(19) United States
(12) Patent Application Publication
(10) Pub. No.: US 2023/0392131 A1
(43) Pub. Date: Dec. 7, 2023

(54) REPROGRAMMABLE ISCB NUCLEASES AND USES THEREOF

(71) Applicants: THE BROAD INSTITUTE, INC., Cambridge, MA (US); MASSACHUSETTS INSTITUTE OF TECHNOLOGY, Cambridge, MA (US)

(72) Inventors: Feng Zhang, Cambridge, MA (US); Han Altae-Tran, Cambridge, MA (US); Soumya Kannan, Cambridge, MA (US); Fatma Esra Demircioglu, Cambridge, MA (US)

(21) Appl. No.: 18/032,868

(22) PCT Filed: Oct. 22, 2021
(86) PCT No.: PCT/US2021/056361

§ 371 Date: Apr. 20, 2023

Related U.S. Application Data
(60) Provisional application No. 63/105,177, filed on Oct. 23, 2020.
(60) Provisional application No. 63/105,191, filed on Oct. 23, 2020.
(60) Provisional application No. 63/156,857, filed on Mar. 4, 2021.
(60) Provisional application No. 63/195,659, filed on Jun. 1, 2021.
(60) Provisional application No. 63/235,583, filed on Aug. 20, 2021.

(51) Int. Cl. C12N 9/22; C12N 15/10; C12N 15/63

(52) U.S. Cl. CPC C12N 9/22; C12N 15/102; C12N 15/63; C12N 2310/20

(57) ABSTRACT

Systems, methods and compositions for targeting polynucleotides are detailed herein. In particular, engineered DNA-targeting systems comprising IscB polypeptides, novel IscB nucleases and reprogrammable targeting nucleic acid components and methods and application of use are provided.

### CROSS-REFERENCE TO RELATED APPLICATIONS

[0001] This application claims the benefit of and priority to U.S. Provisional Application No. 63/105,191, filed Oct. 23, 2020, entitled “Reprogrammable IscB Polypeptide Nucleases and Use Thereof”, U.S. Provisional No. 63/105,177, filed Oct. 23, 2020, entitled “Nucleic Acid-Guided Nucleases and Use Thereof,” U.S. Provisional Application No. 63/156,857, filed Mar. 4, 2021, entitled “Reprogrammable IscB Polypeptide Nucleases and Use Thereof”, U.S. Provisional Application No. 63/195,659, filed Jun. 1, 2021, entitled “Reprogrammable IscB Polypeptide Nucleases and Use Thereof”, and U.S. Provisional Application No. 63/235,583, filed Aug. 20, 2021, entitled “Reprogrammable IscB Polypeptide Nucleases and Use Thereof”, the contents of which are incorporated by reference in their entireties herein.

### STATEMENT AS TO FEDERALLY SPONSORED RESEARCH

[0002] This invention was made with government support under Grant Nos. HL141201 and HG09761 awarded by The National Institutes of Health. The government has certain rights in the invention.

### REFERENCE TO AN ELECTRONIC SEQUENCE LISTING

[0003] The contents of the electronic sequence listing (“BROD-5290WP_ST25.txt”; Size is 3,078,736 bytes and it was created on Oct. 22, 2021) is herein incorporated by reference in its entirety.

### TECHNICAL FIELD

[0004] The subject matter disclosed herein is generally directed to systems, methods and compositions used for targeted gene modification and nucleic acid editing utilizing systems comprising Isc polypeptides. In particular, the present disclosure provides DNA or RNA-targeting compositions comprising novel DNA or RNA-targeting nucleases and at least one targeting nucleic acid component.

### BACKGROUND

[0005] While there are genome-editing techniques available for producing targeted genome perturbations, there remains a pressing need for new and alternative genome engineering technologies that employ robust novel strategies and molecular mechanisms and are affordable, easy to set up, scalable, and amenable to targeting multiple positions within the genome. The CRISPR-Cas systems of bacterial and archaeal adaptive immunity are some such systems that show extreme diversity of protein composition and genomic loci architecture. These additional desirable tools in genome engineering and biotechnology would further advance the art.

[0006] Citation or identification of any document in this application is not an admission that such a document is available as prior art to the present invention.

### SUMMARY

[0007] In certain example embodiments, non-naturally occurring, engineered compositions comprising an IscB polypeptide comprising a split Ruv-C nuclease domain comprising Ruv-C I, Ruv-CII, and Ruv-CIII subdomains, an HNH domain or both and b) an ωRNA molecule comprising a scaffold and a reprogrammable spacer sequence, the ωRNA molecule capable of forming a complex with the IscB polypeptide and directing the IscB polypeptide to a target polynucleotide.

[0008] The IscB polypeptides may further comprise a N-terminal PLMP domain and/or a conserved C-terminal domain.

[0009] In one embodiment, the IscB polypeptides comprise both a HNH and a split RuvC domain. The HNH domain is located between the Ruv-C II and RuvC-III subdomains. In other embodiments, the IscB polypeptide comprises a split RuvC domain but no HNH domain. In yet other embodiments, the IscB polypeptide comprises a split RuvC domain and no HNH domain.

[0010] In embodiments, the IscB polypeptide comprises about 200 to about 1000 amino acids. The composition may comprise a reprogrammable spacer sequence of 10 nucleotides to 150 nucleotides in length, more preferably about 15 to 45 nucleotides in length. In embodiments, the TAM sequence is 3′ of the target polynucleotide.

[0011] In embodiments, the target polynucleotide is DNA. In an aspect, the ωRNA further comprises an aptamer. In an embodiment, the ωRNA molecule further comprises an extension to add an RNA template.

[0012] In embodiments, the composition of may comprising a functional domain associated with the IscB protein. In an aspect, the functional domain has transposase activity, methylase activity, demethylase activity, translation activation activity, translation repression activity, transcription activation activity, transcription repression activity, transcription release factor activity, chromatin modifying or remodeling activity, histone modification activity, nuclease activity, single-strand RNA cleavage activity, double-strand RNA cleavage activity, single-strand DNA cleavage activity, double-strand DNA cleavage activity, nucleic acid binding activity, detectable activity, or any combination thereof.

[0013] In an embodiment, the composition may further comprise a homologous recombination donor template comprising a donor sequence for insertion into a target polynucleotide.

[0014] A vector system is also provided and may comprise one or more vectors encoding the Isc polypeptide and the ωRNA compositions as detailed herein.

[0015] In embodiments, an engineered cell comprising the composition as detailed herein is provided.

[0016] Methods of modifying a target polynucleotide sequence in a cell, comprising introducing to the cell any one of the compositions as described herein are provided. In an aspect, the polypeptide and/or nucleic acid components are provided via one or more polynucleotides encoding the polypeptides and/or nucleic acid component(s), and wherein the one or more polynucleotides are operably configured to express the IscB polypeptide and/or the ωRNA molecule. In an embodiment, the method introduces one or more mutations include substitutions, deletions, and insertions.

[0017] In an aspect, the composition provides site-specific modification that may comprise cleaving a DNA polynucleotide. In an aspect, the cleaving results in a 5′ overhang on a DNA molecule.

[0018] In one aspect, the present disclosure provides an engineered, non-naturally occurring composition comprising a IscB protein, wherein the IscB protein comprises an N-terminal X domain, a RuvC domain, a Bridge Helix domain, and a C-terminal Y domain.

[0019] In an embodiment, the X domain has an amino acid sequence that share at least 50%, at least 55%, at least 60%, at least 65%, at least 70%, at least 75%, at least 80%, at least 85%, at least 90%, at least 95%, at least 99%, or 100% sequence identity with X domains in Table 1. In one embodiment, the Y domain has an amino acid sequence that share at least 50%, at least 55%, at least 60%, at least 65%, at least 70%, at least 75%, at least 80%, at least 85%, at least 90%, at least 95%, at least 99%, or 100% sequence identity with Y domains in Table 2. In one embodiment, the IscB protein shares at least 80%, at least 85%, at least 90%, at least 95%, at least 99%, or 100% sequence identity with a IscB protein selected from Tables 2 and 3.

[0020] In an embodiment, the N-terminal X domain is no more than 50 amino acids in length. In an embodiment, the composition further comprises an HNH domain. In one embodiment, the RuvC domain comprises a RuvC I subdomain, a Ruv II subdomain and a Ruv III subdomain, and the HNH is located between the Ruv C II and RuvC III subdomains of the RuvC domain. In one embodiment, the IscB protein is no more than 500, no more than 600, no more than 700, or no more than 800 amino acids in length.

[0021] In one embodiment, the composition further comprises a first and second nucleic acid molecules, the first and second nucleic acid molecules capable of forming a duplex, the duplex capable of forming a complex with the IscB protein, wherein the second nucleic acid molecule is a recombinant molecule comprising a heterologous guide sequence capable of directing site-specific binding of the complex to a target sequence of a target polynucleotide. In one embodiment, the composition comprises a single guide molecule capable of forming a complex with the IscB protein and directing site-specific binding of the complex to a target sequence of a target polynucleotide.

[0022] In one embodiment, the IscB protein targets DNA. In one embodiment, the nuclease domains of the IscB protein are catalytically inactive. In one embodiment, the nuclease domain has nickase activity or is engineered to have nickase activity. In one embodiment, the composition comprises a functional domain associated with the IscB protein.

[0023] In one embodiment, the functional domain has transposase activity, methylase activity, demethylase activity, translation activation activity, translation repression activity, transcription activation activity, transcription repression activity, transcription release factor activity, chromatin modifying or remodeling activity, histone modification activity, nuclease activity, single-strand RNA cleavage activity, double-strand RNA cleavage activity, single-strand DNA cleavage activity, double-strand DNA cleavage activity, nucleic acid binding activity, detectable activity, or any combination thereof. In one embodiment, the composition comprises a homologous recombination donor template comprising a donor sequence for insertion into a target polynucleotide. In one embodiment, the target sequence comprises a PAM of NGG or NAC, where N is A, C, G, or T.

[0024] In another aspect, the present disclosure provides one or more polynucleotides encoding one or more components of the composition herein. In another aspect, the present disclosure provides one or more vectors comprising the one or more polynucleotides herein. In another aspect, the present disclosure provides a cell or progeny thereof genetically engineered to express one or more components of the compositions herein. In another aspect, the present disclosure provides a method of targeting a polynucleotide, comprising contacting a sample that comprises a target polynucleotide with the composition herein, or the one or more polynucleotides or one or more vectors of herein.

[0025] In one embodiment, contacting results in modification of a gene product or modification of the amount or expression of a gene product. In one embodiment, the target sequence of the polynucleotide is a disease-associated target sequence.

[0026] In another aspect, the present disclosure provides an engineered, non-naturally occurring composition comprising: the IscB protein herein, wherein the IscB protein is catalytically inactive, a nucleotide deaminase associated with or otherwise capable of forming a complex with the IscB protein, and a single guide molecule capable of forming a complex with the IscB protein and directing site-specific binding at a target sequence. In one embodiment, the nucleotide deaminase is an adenosine deaminase or a cytidine deaminase.

[0027] In another aspect, the present disclosure provides one or more polynucleotides encoding one or more components of the composition herein. In another aspect, the present disclosure provides one or more vectors encoding the one or more polynucleotides herein. In another aspect, the present disclosure provides a cell or progeny thereof genetically engineered to express one or more components of the composition herein.

[0028] In another aspect, the present disclosure provides a method of editing nucleic acids in target polynucleotides comprising delivering the composition herein, the one or more polynucleotides herein, or one or more vectors herein to a cell or population of cells comprising the target polynucleotides. In one embodiment, the target polynucleotides are target sequences within genomic DNA. In one embodiment, the target polynucleotide is edited at one or more bases to introduce a G→A or C→T mutation.

[0029] In another aspect, the present disclosure provides an isolated cell or progeny thereof comprising one or more base edits made using the method herein. In another aspect, the present disclosure provides an engineered, non-naturally occurring composition comprising: the IscB protein herein, wherein the IscB is catalytically inactive, a reverse transcriptase associated with or otherwise capable of forming a complex with the IscB protein, and a guide molecule capable of forming a complex with the IscB protein and directing site-specific binding of the complex to a target sequence of a target polynucleotide, the guide molecule further comprising a donor sequence for insertion into the target polynucleotide.

[0030] In another aspect, the present disclosure provides one or more polynucleotides encoding one or more components of the composition herein. In another aspect, the present disclosure provides one or more vectors encoding the one or more polynucleotides herein. In another aspect, the present disclosure provides a method of modifying target polynucleotides comprising: delivering the composition herein, the one or more polynucleotides herein, or one or more vectors herein to a cell or population of cells comprising the target polynucleotides, wherein the complex directs the reverse transcriptase to the target sequence and the reverse transcriptase facilitates insertion of the donor sequence from the guide molecule into the target polynucleotide.

[0031] In one embodiment, insertion of the donor sequence: introduces one or more base edits; corrects or introduces a premature stop codon; disrupts a splice site; inserts or restores a splice site; inserts a gene or gene fragment at one or both alleles of the target polynucleotide; or; a combination thereof.

[0032] In another aspect, the present disclosure provides an isolated cell or progeny thereof comprising the modifications made using the method herein. In another aspect, the present disclosure provides an engineered, non-naturally occurring composition comprising: the IscB protein herein, a non-LTR retrotransposon protein associated with or otherwise capable of forming a complex with the IscB protein; a single guide molecule capable of forming a complex with the IscB protein and directing site-specific binding to a target sequence of a target polynucleotide; and a donor construct comprising a donor polynucleotide for insertion to the target polynucleotide and located between two binding elements capable of forming a complex with the non-LTR retrotransposon protein.

[0033] In one embodiment, the IscB protein is fused to the N-terminus of the non-LTR retrotransposon protein. In one embodiment, the IscB protein is engineered to have nickase activity. In one embodiment, the guides directs the fusion protein to a target sequence 5′ of the targeted insertion site, and wherein the IscB protein generates a double-strand break at the targeted insertion site. In one embodiment, the guides directs the fusion protein to a target sequence 3′ of the targeted insertion site, and wherein the IscB protein generates a double-strand break at the targeted insertion site. In one embodiment, the donor polynucleotide further comprises a polymerase processing element to facilitate 3′ end processing of the donor polynucleotide sequence. In one embodiment, the donor polynucleotide further comprises a homology region to the target sequence on the 5′ end of the donor construct, the 3′ end of the donor construct, or both. In one embodiment, the homology region is from 8 to 25 base pairs.

[0034] In another aspect, the present disclosure provides one or more polynucleotides encoding one or more components of the composition herein. In another aspect, the present disclosure provides one or more vectors comprising the one or more polynucleotides herein. In another aspect, the present disclosure provides a method of modifying target polynucleotides comprising: delivering the composition herein, the one or more polynucleotides herein, or one or more vectors herein to a cell or population of cells comprising the target polynucleotides, wherein the complex directs the non-LTR retrotransposon protein to the target sequence and the non-LTR retrotransposon protein facilitates insertion of the donor polynucleotide sequence from the donor construct into the target polynucleotide.

[0035] In one embodiment, insertion of the donor sequence: introduces one or more base edits; corrects or introduces a premature stop codon; disrupts a splice site; inserts or restores a splice site; inserts a gene or gene fragment at one or both alleles of the target polynucleotide; or; a combination thereof.

[0036] In another aspect, the present disclosure provides an isolated cell or progeny thereof comprising the modifications made using the method herein.

[0037] These and other aspects, objects, features, and advantages of the example embodiments will become apparent to those having ordinary skill in the art upon consideration of the following detailed description of illustrated example embodiments.

### BRIEF DESCRIPTION OF THE DRAWINGS

[0038] An understanding of the features and advantages of the present invention will be obtained by reference to the following detailed description that sets forth illustrative embodiments, in which the principles of the invention may be utilized, and the accompanying drawings of which:

[0039] FIG. 1—IscB is reprogrammable and cleaves dsDNA in a target and target adjacent motif (TAM)-specific manner. Left panel shows cleaving of endogenous spacer, right panel, cleavage of engineered spacer.

[0040] FIG. 2—TAM weblogo shows 3′ TAM base preference of K. racemifer IscB system.

[0041] FIG. 3—IscB sequence logo of the N-terminal domain from sequence alignment of polypeptides in Table 1, with conserved motifs boxed and annotated.

[0042] FIG. 4-1-4-46—includes a sequence alignment of representative IscB loci from clusters of IscB at 60% identity and 70% coverage.

[0043] FIG. 5—Consensus sequence from representative IscB loci of Table 1.

[0044] FIG. 6A-6C—(6A) TAM weblogo of exemplary IscB from OGEU010000025.1 (6B) Indel frequency compared to negative control condition at VEGFA site 2 using exemplary IscB system in HEK293 cells (6C) Representative indels at VEGFA site 2 from IscB mediated editing, a 20 nt guide is identified.

[0045] FIG. 7A-7B—(7A) HNH domain amino acid sequence of IscB identified in this study (OGEU01000025.1, 494 aa). (7B) ωRNA scaffold nucleotide sequence of IscB identified in this study (OGEU01000025.1_ωRNA).

[0046] FIG. 8A-8B—(8A) Design of guide RNA expression plasmid, pHS0812_Isc_large_27, in backbone of pHS0728 pcDNA3.1 (+) CM. (8B) Design of IscB expression plasmid, pHS0810_Isc_large_27, in backbone of pHS0728 pcDNA3.1 (+) CM.

[0047] FIG. 9A-9G—IscBs are associated with ncRNAs of unknown function. (9A) Comparison of IscB and Cas9 domains and previously described ncRNAs. (9B) Phylogenetic analysis of the RuvC, bridge helix, and HNH domains of Cas9 and IscB clusters. Genomic association shows 15/603 IscB clusters have strong association to CRISPR, occurring independently in multiple clades. (9C) Small RNA-seq of a heterologously expressed locus (top) and additionally after an RNP pulldown (bottom). (9D) Weblogo of 3′ PAMs depleted more than 5 standard deviations relative to a non-targeting control. (9E) In vitro cleavage by IscB-single guide RNA RNP complex. (9F) (Top) Conservation analysis of regions upstream of N=563 non-redundant IscB loci. (Bottom) Small RNA-seq of an IscB locus in K. racemifer. (9G) Secondary structure predictions of CRISPR-associated IscB ncRNA andIscB ωRNA. Guiding function of ωRNAs was inferred by comparison of the two structures. TE: transposon end.

[0048] FIG. 10—PLMP Domain. Weblogo of PLMP domain found in IscB and IsrB proteins immediately upstream of the RuvC-I domain.

[0049] FIG. 11—Non-coding region IscB RNA examples. Associated IscB non-coding region examples folded as RNA via ViennaRNA at 55° C. Black arrows indicate GU pairs characteristic of RNA structure.

[0050] FIG. 12—Small RNA-seq of IscB loci in K. racemifer. Small RNA-seq reads greater than 200 bp mapped to the 49 IscB loci present in K. racemifer. 38 of 49 loci contains an expressed ncRNA transcript corresponding to a guide and ωRNA scaffold upstream of the IscB ORF. Loci with low or undetectable levels of ωRNA are annotated based on computational prediction of the ωRNA scaffold but the guide is not annotated.

[0051] FIG. 13A-13C—Characterization of KraIscB-1 reprogramming and cleavage. (13A) Small RNA-seq of recombinantly purified KraIscB-1 in the presence of its endogenous locus. The predicted ωRNA scaffold along with an upstream region co-purified with KraIscB-1 protein, indicating physical interaction of the ωRNA with KraIscB-1. (13B) KraIscB-1 is a reprogrammable dsDNA nuclease. IVTT reactions with KraIscB-1 and ωRNAs with endogenous or reprogrammed guide sequences incubated with cognate or incorrect targets demonstrates TAM and target-dependent cleavage. Reactions were run on native PAGE gels and imaged in IR800 and IR700 channels to capture target strand (TS) and non-target strand (NTS) cleavage products, respectively. (13C) Substrate cleavage by wild-type and nuclease domain mutants of KraIscB-1 demonstrates strand-specific cleavage by each nuclease domain.

[0052] FIG. 14A-14B—CRISPR-associated IscB ncRNA pseudoknot plays a necessary role in target cleavage. (14A) CRISPR-associated IscB ncRNA variants tested. The leftmost sequence is the endogenous sequence. Middle sequence (ncRNA 1) is mutated (blue) on the nexus-adjacent region to abolish predicted base-pairing interactions in the pseudoknot. The rightmost sequence (ncRNA 2) contains mutations in both strands of the pseudoknot (blue) such that predicted base pairing is retained. (14B) IVTT cleavage assays with CRISPR-associated IscB and ncRNA variants shows that mutations which abolish the predicted base-pairing (ncRNA 1) also abolish activity, whereas compensatory mutations that retain the predicted base-pairing interaction (ncRNA 2) allow for target cleavage, implying that the pseudoknot structure plays a necessary functional role in CRISPR-associated IscB-mediated target cleavage.

[0053] FIG. 15A-15G—IscB is an RNA-guided DNA endonuclease. (15A) Design of an IVTT-based TAM screen. (15B) KraIscB-1 endogenous target and reprogrammed target sequences used in IVTT TAM screens. (15C) KraIscB-1 cleaves DNA in an ωRNA-dependent manner with an ATAAA 3′ TAM. (15D) AwaIscB cleaves DNA with an ATGA 3′ TAM. (15E) In vitro-reconstituted AwaIscB-ωRNA RNP cleavage of dsDNA substrates in the presence or absence of a target and/or TAM. (15F) In vitro cleavage of AwaIscB with selectively inactivated nuclease domains. (15G) Sequencing of cleavage products generated by AwaIscB.

[0054] FIG. 16A-16D—Guide-encoding mechanisms of IscB. (16A) Example loci for each major mechanism of encoding multiple guides. top to bottom: 1) ωRNAs duplicate or insert into CRISPRs, 2) entire ωRNAs arrays associate with IscB, 3) transposition expansion results in multiple nearly identical loci in each expressing different guides, 4) standalone trans-acting ωRNAs form independently of adjacent IscBs. (16B) K. racemifer encodes 48 IscB loci with cis ωRNAs and 10 standalone trans-acting ωRNAs. (16C) Expression of standalone ωRNAs in K. racemifer. (16D) KraIscB-1, in complex with cis or trans ωRNAs with the same guide sequence, mediate cleavage of dsDNA in a TAM and target-dependent manner. Reactions were performed in IVTT using 5′ strand-specific labeled linear targets.

[0055] FIG. 17A-17G—Biochemical properties of AwaIscB. (17A) Target cleavage by AwaIscB at various temperatures. Reactions were performed at the indicated temperature for 1 hour, run on native PAGE gels and stained with SYBR Gold for imaging. Optimal cleavage activity is observed between 35-40° C. (17B) Kinetics of AwaIscB target cleavage. Reactions were performed at 37° C. and stopped by addition of EDTA at the indicated times, run on a native PAGE gel and stained with SYBR Gold for imaging. Cleavage activity is saturated after 60 min. (17C) Target cleavage by AwaIscB in the presence of various divalent metal ions. AwaIscB requires Mg²⁺ for optimal activity, but can mediate target cleavage in the presence of Ca²⁺. (17D) Guide length optimization for AwaIscB. Cleavage activity is supported with 11-12 nt guides, but at least 17-18 nt guides are required for robust activity. In C and D, all reactions were performed at 37° C. for 1 hour, run on native PAGE gels and stained with SYBR Gold for imaging. (17E) Cy5.5-labeled ssDNA cleavage by AwaIscB wild type and nuclease domain catalytic mutants. Reactions were performed at 37° C. for 1 hour, run on denaturing PAGE gels and imaged in the IR700 channel. AwaIscB exhibits weak TAM-independent but target-dependent activity, with specific cleavage products generated by each nuclease domain. Cleavage activity of the HNH domain is enhanced in RuvC-inactivated AwaIscB in a TAM-dependent manner. Cleavage activity is abolished upon mutation of both nuclease domains. (17F) Cy5-labeled ssRNA cleavage by AwaIscB wild type and nuclease domain catalytic mutants. Reactions were performed at 37° C. for 1 hour, run on denaturing PAGE gels and imaged in the Cy5 channel. No cleavage activity is observed on ssRNA substrates by AwaIscB. (17G) Collateral activity of AwaIscB. Wild-type or RuvC-inactivated AwaIscB were incubated with unlabeled dsDNA or ssDNA targets and a Cy5.5-labeled collateral ssDNA substrate for 3 hours at 37° C. Reactions were run on denaturing PAGE gel and imaged in the IR700 channel to capture cleavage of the collateral substrate. No collateral activity is observed.

[0056] FIG. 18A-18B—Target cleavage site mapping of awaiscb nickase mutants. Sequencing of cleavage products from (18A) Awaiscb RuvC-II (e157a) and (18B) hnh (h212a) catalytic mutants demonstrates strand-specific nicking of targeted strand by the hnh domain 3 nt downstream of the tam and non-targeted strand by the ruvc domain 8-16 nt upstream of the TAM.

[0057] FIG. 19A-19E—Exonuclease III footprinting of dAwaIscB ternary complex. (19A) Schematic of Exonuclease III (ExoIII) footprinting experiment. Catalytically inactivated AwaIscB (dAwaIscB)-ωRNA complex bound to a target dsDNA substrate is digested with Exo III. ExoIII is sterically hindered when the dAwaIscB RNP complex is reached. Quenched reactions are subjected to ligation of adapters for next-generation sequencing, and position of adapter ligation allows for inference of the position of ExoIII hindrance, indicating protection by the dAwaIscB RNP complex. (19B-C) 3′ adapter ligation position after ExoIII treatment of dAwaIscB with and without ωRNA, respectively. Specific protection of the target strand 19 nt upstream of the TAM and the non-target strand 6 nt downstream of the target sequence is observed in the ωRNA condition, in contrast to a low level of non-specific adapter ligation when the ωRNA is not present. (19D-E) dSpCas9 with or without a corresponding sgRNA, respectively, was assayed as a positive control. Results shown in (19D) replicate previously reported results using a gel-based readout.

[0058] FIG. 20—Distribution of loci counts.

[0059] FIG. 21—Small RNA-seq of standalone ωRNAs in K. racemifer. Small RNA-seq reads greater than 200 bp mapped to standalone ωRNA loci in K. racemifer. 9 of the 10 loci contain an expressed ncRNA transcript corresponding to a guide and ωRNA scaffold. The ωRNA scaffold that is not expressed belongs to a group associated primarily with IsrB (G1c group—see FIG. 40).

[0060] FIG. 22A-22B—Likelihood mapping of main alignments. (22A) Likelihood mapping analysis for the main alignments used in this study performed using IQ Tree 2. The PLMP aa alignment displays high star-like behavior due to the presence of many divergent sequences. (22B) Results for statistical analysis assessing whether or not phylogenetic assumptions hold for the main alignments used in this study. 3 types of tests were performed using IQ Tree 2: symmetry (sym), marginal symmetry (mar), and internal symmetry (sym). P-values indicating severe violations (p<0.01) are shown in bold. The RuvC/BH/HNH aa alignment containing IscBs and Cas9s had a significant p-value for the marginal symmetry test, indicating it likely violates the stationarity assumption of typical phylogenetic analysis. Similarly, the hi-res full CDS DNA alignment of early Cas9s violates the stationarity assumption. No alignments had significant p-values for the internal symmetry test, suggesting that they might not violate the homogeneity assumption.

[0061] FIG. 23—Complete RuvC/BH phylogenetic analysis with IQ Tree 2. Maximum likelihood phylogenetic analysis of all IsrB, IscB and Cas9 RuvC/BH domains using IQ Tree 2. The LG substitution model with Gamma rates with 4 categories was used with 5000 ultra fast bootstraps (with hill-climbing nearest neighbor change for each bootstrap tree). The tree was rooted on the IsrB family. Associations are calculated for each cluster based on non-redundant loci (at 90% sequence identity of the main locus ORF). Ga-Gi refer to the IscB/IsrB main ωRNA profiles in FIG. 40. HNH domain associations are shown with 3 colors, with cyan indicating the HNH domain has the H, N, and H catalytic residues, magenta indicating the HNH domain has the H, N, and N catalytic residues, and grey indicating that the HNH domain has an H, N, and not H/N catalytic residues. Sizes of REC-like insertion in the representative protein sequence for each cluster are shown as determined by the number of amino acids between the BH and the RuvC-II in the alignment. Total size of the representative protein sequence for each cluster is shown on the outer ring.

[0062] FIG. 24—Complete RuvC/BH/HNH phylogenetic (IQ Tree 2)×5000 UFbs tree with associations. Maximum likelihood phylogenetic analysis of all IscB and Cas9 RuvC/BH/HNH domains using IQ Tree 2. The LG substitution model with Gamma rates with 4 categories was used with 5000 ultra fast bootstraps (with hill-climbing nearest neighbor change for each bootstrap tree). Tree is rooted using cluster 34777, which include some of the most ancestral IscBs as determined by the RuvC/BH phylogenetic analyses. Associations are calculated for each cluster based on non-redundant loci (at 90% sequence identity of the main locus ORF). Ga-Gi refer to the IscB/IsrB main ωRNA profiles in FIG. 38A. HNH domain associations are shown with 3 colors, with cyan indicating the HNH domain has the H, N, and H catalytic residues, magenta indicating the HNH domain has the H, N, and N catalytic residues, and grey indicating that the HNH domain has an H, N, and not H/N catalytic residues. Sizes of REC-like insertion in the representative protein sequence for each cluster are shown as determined by the number of amino acids between the BH and the RuvC-II in the alignment. Total size of the representative protein sequence

[0063] FIG. 25—Complete RuvC/BH/HNH phylogenetic (RA×ML)×2000 bs.

[0064] Maximum likelihood phylogenetic analysis of all IscB and Cas9 RuvC/BH/HNH domains using RA×ML. The PROTGAMMALG model was used with 2000 rapid bootstraps. Tree is rooted using cluster 34777, which include some of the most ancestral IscBs as determined by the RuvC/BH phylogenetic analyses. Associations are calculated for each cluster based on non-redundant loci (at 90% sequence identity of the main locus ORF). Ga-Gi refer to the IscB/IsrB main ωRNA profiles in FIG. 40. HNH domain associations are shown with 3 colors, with cyan indicating the HNH domain has the H, N, and H catalytic residues, magenta indicating the HNH domain has the H, N, and N catalytic residues, and grey indicating that the HNH domain has an H, N, and not H/N catalytic residues. Sizes of REC-like insertion in the representative protein sequence for each cluster are shown as determined by the number of amino acids between the BH and the RuvC-II in the alignment. Total size of the representative protein sequence for each cluster is shown on the outer ring.

[0065] FIG. 26—Complete RuvC/BH/HNH phylogenetic (mrbayes)×10M iterations. Bayesian phylogenetic analysis of IscB and early Cas9 RuvC/BH/HNH domains using MrBayes with random starting trees. The LG substitution model was used with Gamma rates with 4 categories. 4 independent runs were run with 16 chains per with a delta temperature of 0.025 per chain for a total of 10M generations. 1000 swaps were attempted each generation, and tree samples were collected every 50 generations. The average standard deviation of split frequencies was 0.057890 at the final generation. Associations are calculated for each cluster based on non-redundant loci (at 90% sequence identity of the main locus ORF). Ga-Gi refer to the IscB/IsrB main ωRNA profiles in FIG. 40. HNH domain associations are shown with 3 colors, with cyan indicating the HNH domain has the H, N, and H catalytic residues, magenta indicating the HNH domain has the H, N, and N catalytic residues, and grey indicating that the HNH domain has an H, N, and not H/N catalytic residues. Sizes of REC-like insertion in the representative protein sequence for each cluster are shown as determined by the number of amino acids between the BH and the RuvC-II in the alignment. Total size of the representative protein sequence for each cluster is shown on the outer ring.

[0066] FIG. 27—Same phylogenetic tree as FIG. 26 with a focus on early Cas9 evolution. Bayesian posterior probabilities for each branch are shown along with the standard deviation of the posterior across all 4 runs.

[0067] FIG. 28—High resolution early Cas9 evolution tree (aa model) (IQ Tree 2). Maximum likelihood phylogenetic analysis of early Cas9 evolution complete protein sequences (excluding large portions of Cas9 specific REC-like insertions) using IQ Tree 2. The WAG substitution model with empirical amino acid frequencies, invariant sites, and Gamma rates with 4 categories was used with 5000 ultra fast bootstraps (with hill-climbing nearest neighbor change for each bootstrap tree). Tree is rooted using a representative from cluster 18054, which is more distantly related to the other sequences as determined by RuvC/BH/HNH trees. Support values are shown above each branch.

[0068] FIG. 29—Complete RuvC/BH phylogenetic analysis with IQ Tree 2. Maximum likelihood phylogenetic analysis of all IsrB, IscB and Cas9 RuvC/BH domains using IQ Tree 2. The LG substitution model with Gamma rates with 4 categories was used with 5000 ultra fast bootstraps (with hill-climbing nearest neighbor change for each bootstrap tree). The tree was rooted on the IsrB family. Associations are calculated for each cluster based on non-redundant loci (at 90% sequence identity of the main locus ORF). Ga-Gi refer to the IscB/IsrB main ωRNA profiles in FIG. 40. HNH domain associations are shown with 3 colors, with cyan indicating the HNH domain has the H, N, and H catalytic residues, magenta indicating the HNH domain has the H, N, and N catalytic residues, and grey indicating that the HNH domain has an H, N, and not H/N catalytic residues. Sizes of REC-like insertion in the representative protein sequence for each cluster are shown as determined by the number of amino acids between the BH and the RuvC-II in the alignment. Total size of the representative protein sequence for each cluster is shown on the outer ring.

[0069] FIG. 30—IscB/IsrB ωRNA phylogenetic analysis focused on Cas9 evolution. Same phylogenetic tree is FIG. 39 but focused on the early Cas9 evolution with the CRISPR-associated IscB cluster 2089. Support values for each branching are shown above the branches. Not all clusters included in other phylogenetic analyses could not be included in this analysis due to lack of a completely alignable ωRNA. For example, clusters 57212 and 50962 were not included. Clusters 2964, 21041, 57212, and 50962 were inferred as ancestral relative to the CRISPR-associated IscB cluster 2089 for the RuvC/BH/HNH amino acid phylogenetic analyses with RA×ML (FIG. 37).

[0070] FIG. 31A-31C—Diversity and evolution of IscB. (31A) Phylogenetic tree of IsrB, IscB and Cas9. Associations with IS200/605 TnpA, ωRNA, CRISPR arrays, anti-repeats (where applicable), and Cas acquisition genes. ORF size of cluster representative is shown on the outermost ring. Positions of evolutionary events described in (31A) are marked by colored circles/squares. (31B) Inferred evolutionary timeline linking IsrB to Cas9 with exemplifying loci. (31C) Structural diversity and evolution of ωRNAs in IsrB and IscB systems.

[0071] FIG. 32A-32B—High resolution early Cas9 evolution tree (aa model) (IQ Tree 2). (32A) Maximum likelihood phylogenetic analysis of early Cas9 evolution complete protein sequences (excluding large portions of Cas9 specific REC-like insertions) using IQ Tree 2. The WAG substitution model with empirical amino acid frequencies, invariant sites, and Gamma rates with 4 categories was used with 5000 ultra fast bootstraps (with hill-climbing nearest neighbor change for each bootstrap tree). Tree is rooted using a representative from cluster 18054, which is more distantly related to the other sequences as determined by RuvC/BH/HNH trees. Support values are shown above each branch. (32B) Bayesian phylogenetic analysis of the high resolution early Cas9 amino acid alignment. MrBayes was run with 8 independent runs with 16 chains and a temperature delta of 0.025 per chain for 1M generations with 1000 swaps attempted each generation. The model parameters were LG substitution model and Gamma rates with 4 categories. MCMC samples were collected from each cold chain every 50 generations. The average standard deviation of split frequencies was 0.005069 at the final generation. Each leaf in the tree corresponds to an individual locus with the cluster id preceding the contig accession number separated by an underscore. Taxon 18054_CP026721.1 was included as a more distant IscB in the alignment and selected as the outgroup. Posterior branch probabilities (percentages) are displayed along with the standard deviation computed across all 8 runs with branch colors ranging from red (probability 0.7) to black (probability 1.0).

[0072] FIG. 33A-33C—High resolution early Cas9 evolution tree (dna model). (33A) Maximum likelihood phylogenetic analysis of early Cas9 evolution CDS DNA sequences using IQ-Tree 2. The GTR substitution model with empirical amino acid frequencies, invariant sites, and Gamma rates with 4 categories was used with 5000 ultrafast bootstraps (with hill-climbing nearest neighbor change for each bootstrap tree). Tree is rooted using a representative from cluster 18054, which is more distantly related to the other sequences as determined by RuvC/BH/HNH trees. Support values are shown above each branch. (33B) Same as (A) except with the GHOST heterotachy mixture model with 2 mixture classes in place of Gamma rates (Crotty, S. et al. (2020), Syst. Biol. 69, 249-264). Bootstrap support values are shown for each branch, followed by the corresponding branch length for each mixture tree separated by a backslash. Taxa are shown at each leaf followed by the corresponding branch length for each mixture tree. (33C) Bayesian phylogenetic analysis of the high resolution early Cas9 DNA alignment. MrBayes was run with 8 independent runs with random starting trees, and 16 chains with a temperature delta of 0.01 per chain for 2M generations with 1000 swaps attempted each generation. The model parameters were GTR substitution model and Gamma rates with 4 categories. MCMC samples were collected from each cold chain every 50 generations. The average standard deviation of split frequencies was 0.043215 at the final generation. Each leaf in the tree corresponds to an individual locus with the cluster id preceding the contig accession number separated by an underscore. Taxon 18054_CP026721.1 was included as a more distant IscB in the alignment and selected as the outgroup. Posterior branch probabilities (percentages) are displayed along with the standard deviation computed across all 8 runs with branch colors ranging from red (probability 0.7) to black (probability 1.0).

[0073] FIG. 34A-34B—Early Cas9 phylogeny using maximum likelihood Phylogenetic analysis of the RuvC/BH/HNH domains of early Cas9s and all IscBs using IQ Tree 2. Each tree is the best scoring ML tree of 5 independent runs. Bootstrap supports were computed with 5000 ultrafast bootstraps. (34A) Phylogenetic analysis using the LG substitution model with gamma rates (4 categories). (34B) Phylogenetic analysis using the LG substitution model with invariant sites and gamma rates (4 categories).

[0074] FIG. 35A-35D—Sensitivity analysis for inferred Cas9 ancestor (35A) RA×ML maximum likelihood phylogenetic tree of the RuvC/BH/HNH alignment with 2000 rapid boot straps for computing support values. Only sections of the tree relevant to the early evolution of Cas9 are shown. (35B) BLOSUM62 similarity comparison of the RuvC-I, RuvC-II, RuvC-III, and HNH core regions (with alignment trimming, alignments provided in supplementary file XXX) for early Cas9 II-D (clusters Cas9_1261, Cas9_665, Cas9_1079), a typical Cas9 (cluster Cas9_758), the putative Cas9 ancestor (2089), and example IscBs. (35C-35D) random taxon dropout analysis using FastTree2. Sample size for each dropout percentage category was calculated such that each taxon is retained on average for 1000 bootstrap samples. Clusters 2089, Cas9_1079, Cas9_665, and Cas9_1261 were retained in all samples. Error bars were calculated using 2000 bootstraps from the final samples. (35C) proportion of trees supporting CRISPR-associated IscB 2089 as the direct ancestor of all Cas9s as a function of taxa dropout rate. (35D) proportion of trees supporting mono/paraphyletic topologies involving Cas9, IsrB, or early II-D Cas9s as a function of the taxa dropout rate.

[0075] FIG. 36—Comparison of early Cas9 tracrRNAs to conserved ωRNAs from IscB and IsrB. ωRNA from the putative ancestor of all Cas9s (2089) is shown as well. Conserved region shared by the tracrRNA and IscB/IsrB ωRNAs corresponds to the nexus pseudoknot hairpin. Alignment was generated using MAFFT-ginsi. Additional, less conserved regions are not shown for this alignment. Specifically, the 5′ end is not conserved between tracrRNA and IscB ωRNAs.

[0076] FIG. 37—IscB/IsrB ωRNA phylogenetic analysis using IQ Tree 2. Maximum likelihood phylogenetic tree inference for the DNA alignment of ωRNA from IscB/IsrBs using IQ Tree 2. This tree was built using the best likelihood scoring tree of 200 independent runs as the starting tree with 5000 ultra fast bootstraps (with hill-climbing nearest neighbor change for each bootstrap tree) under the GTR substitution model, using empirical DNA frequencies from the alignment, ascertainment bias correction, and Gamma rates with 4 categories.

[0077] FIG. 38A-38B—Diverse ωRNAs associated with isrB and iscB. Secondary structure predictions for the main groups of ωRNA scaffolds associated with iscBs and iscBs. (38A) G1a, G1d, G1e, G1f, G1g, and G1i are associated with iscB while (38B) G1b, G1c, G1h are associated with isrB. G1a, G1b, G1c, G1d, G1h, and G1i secondary structures were predicted using R-scape while G1e, G1f, G1g were computed using consensus secondary structures with ViennaRNA due to the smaller sample sizes. While pseudoknots were not identified de novo for G1e, G2f, G1g, potential pseudoknots in similar locations to the other iscB/isrB ωRNAs can be found. Guide locations for all iscB/isrB ωRNAs would be predicted to be immediately upstream from each ωRNA scaffold where the 5′ label is located.

[0078] FIG. 39A-39J—Exploration of the diversity of IS200/605 superfamily nucleases. (39A) Evolution between IS200/605 transposon superfamily-encoded nucleases and associated RNAs. Dashed lines reflect tentative/unknown relationships. (39B) Locations of IscB loci and fragments in the I. tetrasporus genome. Intact locus is labeled as “ChlorIscB.” (39C) Small RNA-seq of I. tetrasporus. (39D) Weblogo of ChlorIscB cleavage TAM using a reprogrammed guide in an IVTT TAM screen. (39E) Weblogo of OgeuIscB TAM using a reprogrammed guide in an IVTT TAM screen. (39F) Targeted OgeuIscB mediated indel formation in HEK293FT cells ordered by abundance, with indel size on the left. (39G) OgeuIscB mediated indel formation at multiple sites in HEK293T cells (* indicates p<0.05). (39H) Native expression of IsrB ωRNA in K. racemifer. (39I) Weblogo of Desulfovigula thermocuniculi (DthIsrB) TAM using a reprogrammed guide in an IVTT TAM screen. (39J) DthIsrB mediates ωRNA-guided non-target strand nicking in a TAM- and target-dependent manner in an IVTT cleavage assay using 5′ strand-specific labeled targets.

[0079] FIG. 40A-40C—Genome editing in human cells with OgeuIscB. (40A) Schematic of experiment to screen large IscB proteins for indel-generating activity in HEK293FT cells. Plasmids expressing the protein of interest were co-transfected with a mini-library of 12 ωRNAs targeting various loci in the human genome. After approximately 3 days, genomic DNA was harvested and amplicons containing loci targeted by each ωRNA in the sample were amplified and sequenced to determine indel rates. (40B) Targeting OgeuIscB to 3 human genomic loci in HEK293FT cells with ωRNAs containing guides of various lengths shows that a 16 nt guide generally mediates optimal indel formation. NT: non-targeting ωRNA. Statistical significance was assessed using a two-tailed T-test with the non-targeting ωRNA as the null condition, * p<0.05. (40C) Additional genomic loci targeted by OgeuIscB using ωRNAs with 16 nt guides. Statistical significance was assessed using a two-tailed T-test with the non-targeting ωRNA as the null condition, * p<0.05.

[0080] FIG. 41—Small RNA-seq of IsrB loci from K. racemifer shows expressed associated ωRNAs. Small RNA-seq reads greater than 200 bp mapped to the 5 IsrB loci present in K. racemifer. Each locus contains an expressed ncRNA transcript corresponding to a guide and ωRNA scaffold upstream of the IsrB ORF.

[0081] FIG. 42A-42C—IsrB nicks dsDNA in a target and TAM-dependent manner. (42A) Target cleavage by DthIsrB at various temperatures from 40 C to 70 C at 5 C increments. All cleavage reactions were performed using RNP complexes produced by IVTT reactions for 1 hour at the indicated temperatures, run on denaturing PAGE gels, and imaged in the IR800 and IR700 channels. Optimal temperature for nicking activity is approximately 60 C. Additionally, double-stranded cleavage was not observed at any temperature. (42B) Target cleavage by DchIsrB at various temperatures from 30 C to 60 C at 5 C increments. All cleavage reactions were performed using NP complexes produced by IVTT reactions for 1 hour at the indicated temperatures for 1 hour at the indicated temperatures, run on denaturing PAGE gels, and imaged in the IR700 and IR800 channels. Optimal temperature for nicking activity is approximately 45° C. Double-stranded cleavage was not observed at any temperature. (42C) Target cleavage by DthIsrB, DchIsrB, and KraIscB-1 performed at optimal temperatures (60° C., 45° C., and 37° C. respectively). All cleavage reactions were performed using RNP complexes produced by IVTT and incubated for 1 hour at their respective temperatures. Products were run on native PAGe and denaturing PAGE gels and imaged in the IR800 and IR700 channels. DthIsrB and DchIsrB perform non-target strand dsDNA nicking with no detectable double-stranded cleavage compared to KraIscB-

[0082] FIG. 43—Phylogenetic distribution. Distribution of IscB, IsrB, and Cas9 across archaeal and bacterial phyla. Heatmap displays percentages of genomes containing a specific system.

[0083] FIG. 44—Examples of Type II-E Cas9 loci. ITRs are found in multiple loci, though ITRs within the same loci may not be identical. Black rectangles represent CRISPR direct repeats.

[0084] FIG. 45—Naturally-occurring RNA-guided DNA-targeting systems. Comparison of Ω (OMEGA) systems with other known RNA-guided systems. In contrast to CRISPR systems, which capture spacer sequences and store them within the CRISPR array, in the locus, Ω systems transpose their loci (or trans-acting loci) into target sequences, apparently, converting targets into ωRNA guides in a process that can be called guide conscription.

[0085] FIG. 46A-46C—Activity of individual spacers from a CRISPR-associated IscB locus (46A) Schematic of CRISPR-associated IscB locus from Chesapeake Bay sample containing three spacers flanked by four DRs in a CRISPR array. (46B) Spacer and corresponding 8N PAM library targets for each spacer in the CRISPR array. PSP3 (Fn) is reprogrammed from the sequence endogenously present in the locus to the Fn spacer. (46C) Weblogos of 3′ PAMs depleted more than 5 standard deviations relative to a non-targeting control for each protospacer library.

[0086] FIG. 47A-47B—CRISPR-associated IscB ncRNA pseudoknot plays a necessary role in target cleavage. (47A) CRISPR-associated IscB ncRNA nexus pseudoknot mutants tested. The leftmost sequence is the endogenous sequence. Middle sequence (ncRNA mutant 1) is mutated (blue) on the nexus-adjacent region to abolish predicted base-pairing interactions in the pseudoknot. The rightmost sequence (ncRNA mutant 2) contains mutations in both strands of the pseudoknot (blue) such that predicted base pairing is retained. (47B) IVTT cleavage assays with CRISPR-associated IscB and ncRNA variants shows that mutations which abolish the predicted base-pairing (ncRNA 1) also abolish activity, whereas compensatory mutations that retain the predicted base-pairing interaction (ncRNA 2) allow for target cleavage, implying that the pseudoknot structure plays a necessary functional role in CRISPR-associated IscB-mediated target cleavage.

[0087] FIG. 48—TAMs of active IscB proteins. TAMs of active IscB proteins determined by in vitro plasmid cleavage assays. 57/86 of tested IscBs were found to mediate RNA-guided cleavage activity as assessed by the detection of a TAM. All tested protein sequences and accession of source contig are listed in Table 9.

[0088] FIG. 49—PLMP domain is essential for RNA-guided cleavage function. Cell-free transcription translation cleavage assays with AwaIscB successively truncated at single aa resolution from the N-terminal end guided to labeled Fn target with an ATGAGATC 3′ TAM. In vitro transcription/translation cleavage assays were performed as described, run on a 6% TBE-Urea gel and imaged in the Cy3 and Cy5 channels. Truncating more than 4 aa from the N-terminal PLMP domain abolished cleavage activity.

[0089] FIG. 50—Targets of IscB/IsrB guides. Same as FIG. 52A with results of target search mapped on the second outermost ring. Notable groups are shown as labeled arcs on the outermost ring.

[0090] FIG. 51A-51C—Examples of iscB-containing IS200/605 insertions. (51A) Full view of alignment of contigs with uninserted (top) versus IS200/605 inserted (bottom) sequences. (51B) 5′ end of alignment of uninserted (top) and inserted (bottom) locus. The inferred ωRNA guide (light gray), perfectly matches the target (dark gray), with the alignment gap beginning at the immediate 5′ end of the ωRNA scaffold. (53C) 3′ end of alignment of uninserted (top) and inserted (bottom) locus. ATAAA, a common IscB TAM (FIG. 50), is present at the junction.

[0091] FIG. 52A-52B—Complete RuvC/BH phylogenetic analysis. (52A) Maximum likelihood phylogenetic analysis of all IsrB, IscB and Cas9 RuvC/BH domains using IQ-Tree 2. The LG substitution model with Gamma rates with 4 categories was used with 5000 ultrafast bootstraps (with hill-climbing nearest neighbor change for each bootstrap tree). (52B) Maximum likelihood phylogenetic analysis of all IsrB, IscB and Cas9 RuvC/BH domains using RA×ML. The PROTGAMMALG model was used with 2000 rapid bootstraps. For both (52A) and (52B), the tree was rooted on the IsrB family. Associations are calculated for each cluster based on non-redundant loci (at 90% sequence identity of the main locus ORF). Ga-Gi refer to the IscB/IsrB main ωRNA profiles in FIG. 38A. HNH domain associations are shown with 3 colors, with cyan indicating the HNH domain has the H, N, and H catalytic residues, magenta indicating the HNH domain has the H, N, and N catalytic residues, and grey indicating that the HNH domain has an H, N, and not H/N catalytic residues. Sizes of REC-like insertion in the representative protein sequence for each cluster are shown as determined by the number of amino acids between the BH and the RuvC-II in the alignment. Total size of the representative protein sequence for each cluster is shown on the second outermost ring. Notable groups are shown as labeled colored arcs on the outermost ring.

[0092] FIG. 53A-53B—Complete RuvC/BH/HNH phylogenetic analysis. (53A) Maximum likelihood phylogenetic analysis of all IscB and Cas9 RuvC/BH/HNH domains using IQ-Tree 2. The LG substitution model with Gamma rates with 4 categories was used with 5000 ultrafast bootstraps (with hill-climbing nearest neighbor change for each bootstrap tree). (53B) Maximum likelihood phylogenetic analysis of all IscB and Cas9 RuvC/BH/HNH domains using RA×ML. The PROTGAMMALG model was used with 2000 rapid bootstraps. For both (A) and (B), tree is rooted using cluster 34777, which include some of the most ancestral IscBs as determined by the RuvC/BH phylogenetic analyses. Associations are calculated for each cluster based on non-redundant loci (at 90% sequence identity of the main locus ORF). Ga-Gi refer to the IscB/IsrB main ωRNA profiles in FIG. 38A. HNH domain associations are shown with 3 colors, with cyan indicating the HNH domain has the H, N, and H catalytic residues, magenta indicating the HNH domain has the H, N, and N catalytic residues, and grey indicating that the HNH domain has an H, N, and not H/N catalytic residues. Sizes of REC-like insertion in the representative protein sequence for each cluster are shown as determined by the number of amino acids between the BH and the RuvC-II in the alignment. Total size of the representative protein sequence for each cluster is shown on the second outermost ring. Notable groups are shown as labeled colored arcs on the outermost ring.

[0093] FIG. 54A-54D—Complete RuvC/BH/HNH phylogenetic analysis of early Cas9 evolution. (54A) Bayesian phylogenetic analysis of IscB and early Cas9 RuvC/BH/HNH domains using MrBayes with random starting trees. The LG substitution model was used with Gamma rates with 4 categories. 4 independent runs were run with 16 chains per with a delta temperature of 0.025 per chain for a total of 10M generations on a GPU for ˜10 days. 1000 swaps were attempted each generation, and tree samples were collected every 50 generations. The average standard deviation of split frequencies was 0.057890 at the final generation. Associations are calculated for each cluster based on non-redundant loci (at 90% sequence identity of the main locus ORF). Ga-Gi refer to the IscB/IsrB main ωRNA profiles in FIG. 38A. HNH domain associations are shown with 3 colors, with cyan indicating the HNH domain has the H, N, and H catalytic residues, magenta indicating the HNH domain has the H, N, and N catalytic residues, and grey indicating that the HNH domain has an H, N, and not H/N catalytic residues. Sizes of REC-like insertion in the representative protein sequence for each cluster are shown as determined by the number of amino acids between the BH and the RuvC-II in the alignment. Total size of the representative protein sequence for each cluster is shown on the second outermost ring. Notable groups are shown as labeled colored arcs on the outermost ring. (54B) Same phylogenetic tree as (A) with a focus on early Cas9 evolution. Bayesian posterior probabilities for each branch are shown along with the standard deviation of the posterior across all 4 runs. (54C)-(54D) Phylogenetic analysis of the RuvC/BH/HNH domains of early Cas9s and all IscBs using IQ-Tree 2. Each tree is the best scoring ML tree of 5 independent runs. Bootstrap supports were computed with 5000 ultrafast bootstraps. (54C) Phylogenetic analysis using the LG substitution model with gamma rates (4 categories). (54D) Phylogenetic analysis using the LG substitution model with invariant sites and gamma rates (4 categories).

[0094] FIG. 55A-55C—IscB/IsrB ωRNA phylogenetic analysis. (55A) Maximum likelihood phylogenetic tree inference for the DNA alignment of ωRNA from IscB/IsrBs using IQ-Tree 2. This tree was built using the best likelihood scoring tree of 200 independent runs as the starting tree with 5000 ultrafast bootstraps (with hill-climbing nearest neighbor change for each bootstrap tree) under the GTR substitution model, using empirical DNA frequencies from the alignment, ascertainment bias correction, and Gamma rates with 4 categories. (55B) Same phylogenetic tree as (55A) but focused on the early Cas9 evolution with the CRISPR-associated IscB cluster 2089. Support values for each branching are shown above the branches. Not all clusters included in other phylogenetic analyses could not be included in this analysis due to lack of a completely alignable ωRNA. For example, clusters 57212 and 50962 were not included. Clusters 2964, 21041, 57212, and 50962 were inferred as ancestral relative to the CRISPR-associated IscB cluster 2089 for the RuvC/BH/HNH amino acid phylogenetic analyses with RA×ML (FIG. 35). (55C) Bayesian phylogenetic analysis of tracrRNA like ωRNAs. TracrRNAs from the early Cas9 clusters Cas9_1261 and Cas9_1665 were joined with their respective DRs and separated by a 4 bp poly-A tetraloop. 23 ωRNAs sharing alignment homology to all structural regions from the two tracrRNAs were identified. The resulting 25 RNAs were then aligned with MAFFT-ginsi and manually curated to reduce gappiness. Bayesian phylogenetic analysis of the resulting alignment was performed using MrBayes with 2 chains at a delta temperature of 0.025 with 8 independent runs for 5M generations. A standard GTR model with gamma rates and 4 categories was used. Trees were sampled every 50 generations. The average standard deviation of split frequencies was 0.005966 at the final generation. Bayesian posterior probabilities for each branching are shown above the branch, along with the average standard deviation across the 8 runs. The analysis suggests that the putative modern IscB ancestor of Cas9 (IscB cluster 2089) has an ωRNA descending from the same lineage of ωRNAs that likely resulted in the DR/tracrRNA (Bayesian posterior probability 89%).

[0095] FIG. 56—Full protein phylogenetic analysis of IscB+earliest Cas9s. Maximum likelihood phylogenetic inference of all IscBs plus earliest Cas9s (Cas9_1261, Cas9_665) with complete protein alignments excluding the PLMP domain and C terminal domain. Tree was inferred using IQ-Tree 2 with the LG substitution model and Gamma rates with 4 categories. Support values for 5000 ultrafast bootstraps are shown above each branch.

[0096] FIG. 57A-57D—Comparison of IsrB, IscB and Cas9 subtype features. (57A) Comparison of protein lengths between IsrB, IscB, IscB (large) and Cas9 subtypes identified in this study. The II-D Cas9 group contains members which are substantially smaller than other Cas9 subtypes, while tnpA-associated II-C encompasses some substantially larger members. (57B) P-values resulting from t-tests of pairwise comparison of length distributions shown in (A). (57C) Comparison of median DR lengths for CRISPR arrays associated with IsrB, IscB, IscB (large), where CRISPR-associated, and Cas9 subtypes. Some tnpA-associated II-C loci contain substantially longer DRs (46-47 bp). (57D) Rate of tnpA association with IsrB, IscB, IscB (large) and Cas9 subtypes. 1/545 (0.2%) of unique IsrB loci, 56/2811 (2.0%) of unique IscB loci, including both IscB and IscB (large), and 115/1918 (6.0%) of unique II-C (TnpA) loci are associated with tnpA.

[0097] FIG. 58—Alignment of IscBs and early Cas9s. Alignment of early Cas9s with the founding IscB (cluster 2089) and other various IscB. Domains and conserved motifs are annotated by red arrows below the consensus alignment.

[0098] FIG. 59A-59C—IscB loci in I. tetrasporus UTEX B 2012. (59A) Alignment of IscB loci in I. tetrasporus UTEX B 2012 chloroplast genome. Experimentally characterized active iscB CDS is shown in dark red, with fragmented iscB CDS shown in lighter red. Top row represents consensus sequence. Second row represents percent identity over a 5 bp sliding window. (59B) Codon usage distribution of iscB (red bars) vs non-iscB (black points) CDS. (59C) Kullback-Leibler divergence of codon usage distribution in each CDS in the I. tetrasporus UTEX B 2012 chloroplast genome relative to the average distribution across all CDS. Experimentally characterized active iscB CDS is shown in red.

[0099] FIG. 60—TnpB locus conservation analysis. Conservation of the 3′ end of tnpB loci that share the KraIscB-1 transposon end. The conserved region on the 3′ region of the tnpB loci corresponds to the 5′ region of the ωRNA of iscB. The conservation of the tnpB loci outside of the ORF on the 3′ end suggests the presence of a ncRNA that may function similarly to the ωRNA of iscB.

[0100] FIG. 61A-61F—Characterization of TnpB ωRNA-guided cleavage. (61A) Small RNA-seq of A. lobatus DSM 43150 TnpB-2 recombinantly purified in the presence of the downstream predicted ωRNA and guide. The predicted ωRNA scaffold and a downstream region constituting the putative guide co-purified with the A. lobatus TnpB-2 protein, suggesting interaction of the protein with the ωRNA transcript. Contig accession and start codon information is available in Tables 11 and 13. NCBI contig accession of original locus: JACHNC010000001.1; tnpB start coordinate: 25000. (61B) TAM screens of additional TnpB loci. (61C) Target cleavage by AmaTnpB at various temperatures. Reactions were performed at the indicated temperature for 1 hour and subsequently run on 2% agarose gels stained with SYBR Gold for imaging. Optimal cleavage activity is observed from 50-60° C. (61D) Kinetics of AmaTnpB target cleavage. Reactions were performed at 60° C., terminated by addition of EDTA at the indicated times, and subsequently run on a 2% agarose gel stained with SYBR Gold for imaging. Cleavage activity is saturated after 30 min. (61E) Sanger sequencing traces of AmaTnpB-digested dsDNA targets show 5′ staggered overhangs. The non-templated addition of a final base is an artifact of the polymerase used in sequencing (which manifests as a terminal Adenine in the TS trace and a terminal Thymine in the NTS trace). The trace for the NTS cleavage product is reverse complemented so that both traces illustrate the sequence of the NTS. Cleavage sites are indicated by red triangles. TS: target strand; NTS: non-target strand. (61F) Cleavage of Cy5-labeled ssRNA by AmaTnpB. Reactions were performed at 60° C. for 1 hour, run on denaturing PAGE gels and imaged in the Cy5 channel. No cleavage of RNA substrates is observed.

[0101] FIG. 62 shows reclustering IscB at 60% sequence identity revealed novel IscB proteins.

[0102] FIG. 63A-63C show that the identified IscB proteins from 00644 cluster were functional with an NAC PAM sequence. (63A) Best fit curve and Weblogo for locus 1: JGI accession Gaa0099850_1002913; (63B) Best fit curve and Weblogo for Locus 2: (JGI Accession Ga0348337_018242). (63C) Best fit curve and Weblogo for Locus 2: (JGI Accession Ga0208542_1002724).

[0103] FIG. 64. PLMP domain is essential for RNA-guided cleavage function. Cell-free transcription translation cleavage assays with AwaIscB successively truncated at single aa resolution from the N-terminal end guided to labeled Fn target with an ATGAGATC 3′ TAM. In vitro transcription/translation cleavage assays were performed as described, run on a 6% TBE-Urea gel and imaged in the Cy3 and Cy5 channels. Panels show that truncations up to 70 aa including deletion of the PLMP domain abolishes activity. For reference, the RuvC-I active aspartate is at residue 57.

[0104] The figures herein are for illustrative purposes only and are not necessarily drawn to scale.

### DETAILED DESCRIPTION OF THE EXAMPLE EMBODIMENTS

### General Definitions

[0105] Unless defined otherwise, technical and scientific terms used herein have the same meaning as commonly understood by one of ordinary skill in the art to which this disclosure pertains. Definitions of common terms and techniques in molecular biology may be found in Molecular Cloning: A Laboratory Manual, 2^{nd} edition (1989) (Sambrook, Fritsch, and Maniatis); Molecular Cloning: A Laboratory Manual, 4^{th} edition (2012) (Green and Sambrook); Current Protocols in Molecular Biology (1987) (F. M. Ausubel et al. eds.); the series Methods in Enzymology (Academic Press, Inc.): PCR 2: A Practical Approach (1995) (M. J. MacPherson, B. D. Hames, and G. R. Taylor eds.): Antibodies, A Laboratory Manual (1988) (Harlow and Lane, eds.): Antibodies A Laboratory Manual, 2^{nd} edition 2013 (E. A. Greenfield ed.); Animal Cell Culture (1987) (R. I. Freshney, ed.); Benjamin Lewin, Genes IX, published by Jones and Bartlet, 2008 (ISBN 0763752223); Kendrew et al. (eds.), The Encyclopedia of Molecular Biology, published by Blackwell Science Ltd., 1994 (ISBN 0632021829); Robert A. Meyers (ed.), Molecular Biology and Biotechnology: a Comprehensive Desk Reference, published by VCH Publishers, Inc., 1995 (ISBN 9780471185710); Singleton et al., Dictionary of Microbiology and Molecular Biology 2nd ed., J. Wiley & Sons (New York, N.Y. 1994), March, Advanced Organic Chemistry Reactions, Mechanisms and Structure 4th ed., John Wiley & Sons (New York, N.Y. 1992); and Marten H. Hofker and Jan van Deursen, Transgenic Mouse Methods and Protocols, 2^{nd} edition (2011).

[0106] As used herein, the singular forms “a” “an”, and “the” include both singular and plural referents unless the context clearly dictates otherwise.

[0107] The term “optional” or “optionally” means that the subsequent described event, circumstance or substituent may or may not occur, and that the description includes instances where the event or circumstance occurs and instances where it does not.

[0108] The recitation of numerical ranges by endpoints includes all numbers and fractions subsumed within the respective ranges, as well as the recited endpoints.

[0109] The terms “about” or “approximately” as used herein when referring to a measurable value such as a parameter, an amount, a temporal duration, and the like, are meant to encompass variations of and from the specified value, such as variations of +/−10% or less, +/−5% or less, +/−1% or less, and +/−0.1% or less of and from the specified value, insofar such variations are appropriate to perform in the disclosed invention. For example, the amount “about 10” includes 10 and any amounts from 9 to 11. For example, the term “about” in relation to a reference numerical value can also include a range of values plus or minus 10%, 9%, 8%, 7%, 6%, 5%, 4%, 3%, 2%, or 1% from that value. It is to be understood that the value to which the modifier “about” or “approximately” refers is itself also specifically, and preferably, disclosed.

[0110] The term “about” as used herein when describing an amino acid sequence length or size or a range or ranges of amino acid sequence lengths or sizes are meant to encompass variations of and from the specificed value, such as variations in amino acid length or size of +/−5 amino acids.

[0111] As used herein, a “biological sample” may contain whole cells and/or live cells and/or cell debris. The biological sample may contain (or be derived from) a “bodily fluid”. The present invention encompasses embodiments wherein the bodily fluid is selected from amniotic fluid, aqueous humour, vitreous humour, bile, blood serum, breast milk, cerebrospinal fluid, cerumen (earwax), chyle, chyme, endolymph, perilymph, exudates, feces, female ejaculate, gastric acid, gastric juice, lymph, mucus (including nasal drainage and phlegm), pericardial fluid, peritoneal fluid, pleural fluid, pus, rheum, saliva, sebum (skin oil), semen, sputum, synovial fluid, sweat, tears, urine, vaginal secretion, vomit and mixtures of one or more thereof. Biological samples include cell cultures, bodily fluids, cell cultures from bodily fluids. Bodily fluids may be obtained from a mammal organism, for example by puncture, or other collecting or sampling procedures.

[0112] The terms “subject,” “individual,” and “patient” are used interchangeably herein to refer to a vertebrate, preferably a mammal, more preferably a human. Mammals include, but are not limited to, murines, simians, humans, farm animals, sport animals, and pets. Tissues, cells and their progeny of a biological entity obtained in vivo or cultured in vitro are also encompassed.

[0113] The term “exemplary” is used herein to mean serving as an example, instance, or illustration. Any aspect or design described herein as “exemplary” is not necessarily to be construed as preferred or advantageous over other aspects or designs. Rather, use of the word exemplary is intended to present concepts in a concrete fashion.

[0114] A protein or nucleic acid derived from a species means that the protein or nucleic acid has a sequence identical to an endogenous protein or nucleic acid or a portion thereof in the species. The protein or nucleic acid derived from the species may be directly obtained from an organism of the species (e.g., by isolation), or may be produced, e.g., by recombination production or chemical synthesis.

[0115] Various embodiments are described hereinafter. It should be noted that the specific embodiments are not intended as an exhaustive description or as a limitation to the broader aspects discussed herein. One aspect described in conjunction with a particular embodiment is not necessarily limited to that embodiment and can be practiced with any other embodiment(s). Reference throughout this specification to “one embodiment”, “an embodiment,” “an example embodiment,” means that a particular feature, structure or characteristic described in connection with the embodiment is included in at least one embodiment of the present invention. Thus, appearances of the phrases “in one embodiment,” “in an embodiment,” or “an example embodiment” in various places throughout this specification are not necessarily all referring to the same embodiment but may. Furthermore, the particular features, structures or characteristics may be combined in any suitable manner, as would be apparent to a person skilled in the art from this disclosure, in one or more embodiments. Furthermore, while some embodiments described herein include some but not other features included in other embodiments, combinations of features of different embodiments are meant to be within the scope of the invention. For example, in the appended claims, any of the claimed embodiments can be used in any combination.

[0116] All publications, published patent documents, and patent applications cited herein are hereby incorporated by reference to the same extent as though each individual publication, published patent document, or patent application was specifically and individually indicated as being incorporated by reference.

### OVERVIEW

[0117] Embodiments disclosed herein provide IscB systems that function as re-programmable nucleases. An IscB system comprises a IscB polypeptide and a nucleic acid component capable of forming a complex with the IscB prolypeptide and directing the complex to a target polynucleotide. The IscB systems include homologs thereof including IsrB and IshB systems that collectively, along with TnpB systems, may be referred to as OMEGA (Obligate Mobile Element Guided Activity) systems or complexes, or Ω systems or complexes. The nucleic acid component may also be referred to herein as a ωRNA or hRNA. IscB polypeptides, and homologs thereof, are considerably smaller than other RNA-guide nucleases. As such, IscB polypeptide represent a novel class of RNA-guided nucleases that do not suffer from the delivery size limitations of other larger single-effector, RNA-guided nucleases, such as Type II and Type V CRISPR-Cas systems. Due to their smaller size, IscBs may be combined with other functional domains, such as nucleobase deaminases, reverse transcriptases, transposases, ligases, topoisomerases, and serine and threonine recombinases and still be packaged in conventional delivery systems, like certain adenoviruse and lentiviral based viral vectors. Thus, among other improvements, the IscB system disclosed herein allow more flexible and effective strategies to manipulate and modify target polynucleotides.

[0118] In another aspect, embodiments disclosed herein include applications the IscB systems, including diagnostics, therapeutics, and methods of detection. Delivery of the proteins and systems disclosed is also provided, including to a variety of cells and via a variety of particles and vectors.

[0119] In another aspect, embodiments disclosed herein provide additional, alternative CRISPR-associated IscB systems that function as reprogrammable nucleases comprising nucleic acid-guided nuclease compositions and methods of use thereof. In general, the compositions may comprise nucleic acid-guided nuclease with small sizes that allow more flexible and effective strategies to manipulate specific polynucleotides. In one aspect, the present disclosure provides compositions comprising nucleic acid-guided nuclease proteins (e.g., IscB proteins) that comprises an N-terminal X domain, a RuvC domain, a Bridge Helix domain, and a C-terminal Y domain. In one embodiment, the X domain may be no more than 50 amino acids in length.

[0120] In one embodiment, the CRISPR-associated IscB composition may further comprise one or more functional domains associated with the nucleic acid-guided nuclease protein, enabling various modifications of target polynucleotides. In some examples, the functional domain may be a nucleotide deaminase, e.g., for modifying a single nucleotide or base pair in a target polynucleotide. In some examples, the functional domain may be a reverse transcriptase, or a non-LTR retrotransposon, e.g., for inserting a donor polynucleotide into a desired location of a target polynucleotide, and/or replacing an existing sequence in the target polynucleotide.

[0121] In another aspect, embodiments disclosed herein include applications of the CRISPR-associated IscB compositions herein, including diagnostics, therapeutics, and methods of detection. Delivery of the proteins and systems disclosed is also provided, including to a variety of cells and via a variety of particles, vesicles and vectors.

### ISCB Polypeptides

[0122] Unless indicated otherwise, the term “IscB polypeptide” will be intended to include IscB, IsrB, and IshB. In one embodiment, IscB polypeptides of the present invention may comprise a split RuvC nuclease domain comprising RuvC-1, Ruv-C II, and Ruv-C III subdomains. Some IscB proteins may further comprise a HNH endonuclease domain. In one example embodiment, the RuvC endoculease domain is split by the insertion of a bridge helix, a HNH domain, or both. However, unlike Cas9, IscB polypeptides do not contain a Rec domain. In addition, IscB polypeptides may further comprise a conserved N-terminal domain (also referred to herein as a PLMP domain), which is not present in Cas9 proteins. IscB proteins may also further comprise a conserved C-terminal domain.

[0123] In one embodiment, IscB nucleic acid-guided polypeptides may comprise CRISPR-associated IscB polypeptides. In one embodiment, the IscB polypeptides are CRISPR-associated proteins, e.g., the loci of the nucleases are associated with an CRISPR array. In one embodiment the IscBs may be referred to as Cas IscBs.

[0124] The Cas IscB nucleic acid-guided nuclease may comprise one or more domains, e.g., one or more of a X domain (e.g., at N-terminus), a RuvC domain, a Bridge Helix domain, and a Y domain (e.g., at C-terminus).

### IscB

[0125] In one example embodiment, an IscB polypeptide comprises, moving from the N- to C-terminus, a PLMP domain, a RuvC-I subdomain, a bridge helix, a RuvC-II subdomain, a HNH domain, a RuvC-III subdomain, and a C terminal domain.

[0126] In certain example embodiments, the IscB polypeptides are between 180 and 800 amino acids in size, between 200 and 790 amino acids in size, between 200 and 780 amino acids in size, between 200 and 770 amino acids in size, between 200 and 760 amino acids in size, between 200 and 750 amino acids in size, between 200 and 740 amino acids in size, between 200 and 730 amino acids in size, between 200 and 720 amino acids in size, between 200 and 720 amino acids in size, between 200 and 710 amino acids in size, between 200 and 700 amino acids in size, between 200 and 690 amino acids in size, between 200 and 680 amino acids in size, between 200 and 670 amino acids in size, between 200 and 660 amino acids in size, between 200 and 650 amino acids in size, between 200 and 640 amino acids in size, between 200 and 630 amino acids in size, between 200 and 620 amino acids in size, between 200 and 610 amino acids in size, between 200 and 600 amino acids in size, between 200 and 590 amino acids in size, between 200 and 580 amino acids in size, between 200 and 570 amino acids in size, between 200 and 560 amino acid, between 200 between 550 amino acids, between 200 and 540 amino acids, between 200 and 530 amino acids, between 200 and 520 amino acids, between 200 and 510 amino acids, between 200 and 500 amino acids, between 200 and 490 amino acids, between 200 and 480 amino acids, between 200 and 470 amino acids, between 200 and 460 amino acids, between 200 and 450 amino acids, between 200 and 440 amino acids, between 200 and 430 amino acids, between 200 and 420 amino acids, between 200 and 410 amino acids, between 200 and 400 amino acids, between 300 and 400 amino acids. between 300 and 500 amino acids, between 300 and 600 amino acids, between 400 and 500 amino acids, or between 500-600 amino acids. In one example embodiment, the polypeptide may range in size from 400-500 amino acids, 400-490 amino acids, 400-480 amino acids, 400-470 amino acids, 400-460 amino acids, 400-450 amino acids, 400-440 amino acids, 400-430 amino acids. Size variation may be dependent, in part, on the particular domain architecture of the IscB or its homolog.

[0127] The IscB polypeptides may be derived from a naturally occurring protein, a modified naturally occurring protein, functional fragment or truncated version thereof, or a non-naturally occurring protein. In one example embodiments, the IscB polypeptide may comprise one or more domains originating from other IscB polypeptide nucleases, more particularly originating from different organisms. In an embodiment, the IscB polypeptide nucleases may be designed by in silico approaches. Examples of in silico protein design have been described in the art and are therefore known to a skilled person. In particular embodiments, the IscB polypeptide loci is not associated with a CRISPR array.

[0128] The IscB polypeptides may also encompasses homologs or orthologs of IscB polypeptides whose sequences are specifically described herein. The terms “ortholog” and “homolog” are well known in the art. By means of further guidance, a “homolog” refers to two genes that share a common ancesteral gene. Homologous proteins may but need not be structurally related or are only partially structurally related. An “ortholog” are two genes that share common ancestral gene but occur in different species. Orthologous proteins may but need not be structurally related or are only partially structurally related. In one embodiment, the homolog or ortholog of a IscB polypeptide nucleases such as referred to herein has a sequence homology or identity of at least 80%, at least 85%, at least 90%, at least 95% with a IscB polypeptide nuclease. In further embodiments, the homolog or ortholog of a IscB polypeptide nuclease has a sequence identity of at least 80%, at least 85%, at least 90%, or at least 95% with a wildtype IscB polypeptide nuclease, in particular embodiment the IscB sequence identified in Table 1 and Table 12.

### RuvC Domain

[0129] The RuvC domain may comprise multiple subdomains, e.g., RuvC-I, RuvC-II and RuvC-III. The subdomains may be separated by interval sequences on the amino acid sequence of the protein.

[0130] Examples of RuvC domains include any polypeptides having a structural similarity and/or sequence similarity to a RuvC domain described in the art. For example, the RuvC domain may share a structural similarity and/or sequence similarity to a RuvC of Cas9. In some examples, the RuvC domain may have an amino acid sequence that share at least 50%, at least 55%, at least 60%, at least 5%, at least 70%, at least 75%, at least 80%, at least 85%, at least 90%, at least 95%, at least 99%, or 100% sequence identity with RuvC domains.

[0131] In some examples, the RuvC domain comprise RuvC-I polypeptide, RuvC-II polypeptide, and RuvC-III polypeptide. Examples of the RuvC-I domain also include any polypeptides having a structural similarity and/or sequence similarity to a RuvC-I domain described in the art. For example, the RuvC-I domain may share a structural similarity and/or sequence similarity to a RuvC-I of Cas9. In some examples, the RuvC domain may have an amino acid sequence that share at least 50%, at least 55%, at least 60%, at least 5%, at least 70%, at least 75%, at least 80%, at least 85%, at least 90%, at least 95%, at least 99%, or 100% sequence identity with RuvC-I domain. The RuvC-II domain also include any polypeptides a structural similarity and/or sequence similarity to a RuvC-II domain described in the art. For example, the RuvC-II domain may share a structural similarity and/or sequence similarity to a RuvC-II of Cas9. In some examples, the RuvC domain may have an amino acid sequence that share at least 50%, at least 55%, at least 60%, at least 5%, at least 70%, at least 75%, at least 80%, at least 85%, at least 90%, at least 95%, at least 99%, or 100% sequence identity with RuvC-II domains. The RuvC-III domain also include any polypeptides a structural similarity and/or sequence similarity to a RuvC-III domain described in the art. For example, the RuvC-III domains may share a structural similarity and/or sequence similarity to a RuvC-III of Cas9. In some examples, the RuvC domain may have an amino acid sequence that share at least 50%, at least 55%, at least 60%, at least 5%, at least 70%, at least 75%, at least 80%, at least 85%, at least 90%, at least 95%, at least 99%, or 100% sequence identity with RuvC-III domains.

[0132] For example, and as described in the art (e.g., Crystal structure of Cas9 in complex with guide RNA and target DNA, Nishimasu et al. Cell, 2014) the RuvC domain of Cas9 consists of a six-stranded mixed β-sheet (β1, β2, β5, β11, β14 and β17) flanked by α-helices (α33, α34 and α39-α45) and two additional two-stranded antiparallel β-sheets (β3/β4 and β15/β16). It has been described that the RuvC domain of Cas9 shares structural similarity with the retroviral integrase superfamily members characterized by an RNase H fold, such as Escherichia coli RuvC (PDB code 1HJR, 14% identity, root-mean-square deviation (rmsd) of 3.6 Å for 126 equivalent Ca atoms) and Thermus thermophilus RuvC (PDB code 4LD0, 12% identity, rmsd of 3.4 Å for 131 equivalent Ca atoms). E. coli RuvC is a 3-layer alpha-beta sandwich containing a 5-stranded beta-sheet sandwiched between 5 alpha-helices. RuvC nucleases have four catalytic residues (e.g., Asp7, Glu70, His143 and Asp146 in T. thermophilus RuvC), and cleave Holliday junctions (or structurally analogous cruciform junctions) through a two-metal mechanism. Asp10 (Ala), Glu762, His983 and Asp986 of the Cas9 RuvC domain are located at positions similar to those of the catalytic residues of T. thermophilus RuvC.

[0133] In an example embodiment, split Ruv-C domain of the IscB proteins may have an HNH domain located between the Ruv-C II and Ruv-C III subdomains as described in more detail below. For example, the IscB protein domain architecture is comprised of the PLMP (P) domain, RuvC-I-II-III domains, a bridge domain (B), an HNH domain and a 3′ terminal carboxyl (C) domain spanning 494 amino acids in the schematic shown in FIG. 9A. The bridge domain is located between the RuvC-I and RuvC-II domains and the HNH domain is located between the RuvC-II and RuvC-III domains (FIG. 9A). Size ranges of the individual subdomains described above range from

### HNH Domain

[0134] HNH domain comprise two antiparallel 3 strands connected with a variable length loop, an alpha helix, with a metal binding site between the two. The HNH conserved sites are conserved across the HNH superfamily, with HNH conservation throughout bacteria. In Cas9 proteins, for example, the HNH domain comprises a two-stranded antiparallel β-sheet (β12 and β13) flanked by four α-helices (α35-α38). It shares structural similarity with the HNH endonucleases characterized by a ββα-metal fold, such as phage T4 endonuclease VII (Endo VII) (PDB code 2QNC, 20% identity, rmsd of 2.7 Å for 61 equivalent Cα atoms) and Vibrio vulnificus nuclease (PDB code 1OUP, 8% identity, rmsd of 2.7 Å for 77 equivalent Cα atoms). HNH nucleases have three catalytic residues (e.g., Asp40, His41, and Asn62 in Endo VII), and cleave nucleic acid substrates through a single-metal mechanism. In the structure of the Endo VII N62D mutant in complex with a Holliday junction, a Mg2+ ion is coordinated by Asp40, Asp62, and the oxygen atoms of the scissile phosphate group of the substrate, while His41 acts as a general base to activate a water molecule for catalysis. Asp839, His840, and Asn863 of the Cas9 HNH domain correspond to Asp40, His41, and Asn62 of Endo VII, respectively, consistent with the observation that His840 is critical for the cleavage of the complementary DNA strand. The N863 Å mutant functions as a nickase, indicating that Asn863 participates in catalysis. The Cas9 HNH domain may cleave the complementary strand of the target DNA through a single-metal mechanism, as observed for other HNH superfamily nucleases. Although the Cas9 HNH domain shares a ββα-metal fold with other HNH endonucleases, their overall structures are distinct, consistent with the differences in their substrate specificities. Accordingly, IscB polypeptides of the present invention may comprises similar HNH domains in terms of sequence and/or function and may likewise comprise mutations analogous to those described above for Cas9 which convert the IscB polypeptide to a nickase. In an exemplary embodiment, a mutation to catalytic RuvC-II residue corresponding to E157A in corresponding to the sequence numbering of AwaIscB in an IscB polypeptide can be performed to abolish or significantly reduce the nucleolytic activity on the non-target DNA strand.

### PLMP Domain

[0135] The IscB polypeptides comprise a conserved N-terminal domain, which is referred to herein as a PLMP domain or an X domain. In embodiments, the N-terminal X domain may have one or more conserved residues and/or motifs as identified in FIG. 3 and FIG. 10; see also FIG. 4-3 for PLMP motif alignment. In one embodiment, the PLMP domain comprises a conserved PLMP (SEQ ID NO:2372) amino acid motif The PLMP motif can be located at or near the N terminus of the IscB polypeptide, including, for example at amino acids 12-15 of AwaIscB, or amino acids corresponding to A. warmingii IscB.

[0136] In some examples, the PLMP domain may be no more than 10, no more than 20, no more than 30, no more than 40, no more than 50, no more than 60, no more than 70, no more than 80, no more than 90, or no more than 100 amino acids in length. For example, the PLMP domain may be no more than 70 amino acids in length, such as comprising 2 3, 4, 5, 6, 7, 8, 9, 10, 11, 12, 13, 14, 15, 16, 17, 18, 19, 20, 21, 22, 23, 24, 25, 26, 27, 28, 29, 30, 31, 32, 33, 34, 35, 36, 37, 38, 39, 40, 41, 42, 43, 44, 45, 46, 47, 48, 49, 50, 51, 52, 53, 54, 55, 56, 57, 58, 59, 60, 61, 62, 63, 64, 65, 66, 67, 68, 69, or 70 amino acids in length. An example PLMP domain can be as identified in, e.g. FIG. 58. PLMP domains may be found upstream of the RuvC-I domain and/or Bridge Helix, where present, of an IscB polypeptide. In one embodiment, the PLMP domain is located within 150, 140, 130, 120, 110, 100, 90, 80, 70, 60, 50, 40, 30, 20 or 10 amino acids upstream of the RuvC-1 domain. See, e.g. FIG. 58.

[0137] In an aspect, truncation of the N-terminus domain of an IscB polypeptide, including. more than 4, 5, 6, 7, 8, 9, 10, 11, 12, 13, 14 or 15 amino acids, up to 70 amino acids of the N terminus, i.e. truncation of the PLMP domain, abolishes activity of the IscB polypeptide. In an aspect, more than 4 amino acids PLMP domain may reduce or abolish IscB activity. C-terminal domain

[0138] The C-terminal domain (also referred to herein as a Y domain) may comprise one or more conserved residues or motifs as shown in FIG. 3. See also, FIGS. 4, 58; The C-terminal domain may be no more than 10, no more than 20, no more than 30, no more than 40, no more than 50, no more than 60, no more than 70, no more than 80, no more than 90, or no more than 100 amino acids in length. For example, the Y domain may be no more than 70 amino acids in length, such as comprising 2 3, 4, 5, 6, 7, 8, 9, 10, 11, 12, 13, 14, 15, 16, 17, 18, 19, 20, 21, 22, 23, 24, 25, 26, 27, 28, 29, 30, 31, 32, 33, 34, 35, 36, 37, 38, 39, 40, 41, 42, 43, 44, 45, 46, 47, 48, 49, 50, 51, 52, 53, 54, 55, 56, 57, 58, 59, 60, 61, 62, 63, 64, 65, 66, 67, 68, 69, or 70 amino acids in length.

[0139] In an aspect, the IscB polypeptide, comprises a C-terminal domain that is structurally homologous to a tudor domain. See, e.g. Ren et al., Cell Res. (2014) 24:1146-1149. Tudor domains typically comprise a barrel-shaped beta strand fold and range in size around 50 and 60 amino acids. See, e.g. Kawale, A. A. & Burmann, B. M. Inherent backbone dynamics fine-tune the functional plasticity of Tudor domains. Structure (2021), incorporated herein by reference; see, in particular, FIG. 1 showing exemplary tudor domain structure.

### Protein Modifications

[0140] The IscB polypeptide nucleases may comprise one or more modifications. As used herein, the term “modified” with regard to a IscB polypeptide nuclease generally refers to a IscB polypeptide nuclease having one or more modifications or mutations (including point mutations, truncations, insertions, deletions, chimeras, fusion proteins, etc.) compared to the wild type counterpart from which it is derived. By derived is meant that the derived enzyme is largely based, in the sense of having a high degree of sequence homology with, a wildtype enzyme, but that it has been mutated (modified) in some way as known in the art or as described herein.

[0141] The modified proteins, e.g., modified IscB polypeptide nuclease may be catalytically inactive (also referred as dead). As used herein, a catalytically inactive or dead nuclease may have reduced or no nuclease activity compared to a wildtype counterpart nuclease. In some cases, a catalytically inactive or dead nuclease may have nickase activity. In some cases, a catalytically inactive or dead nuclease may not have nickase activity. Such a catalytically inactive or dead nuclease may not make either double-strand or single-strand break on a target polynucleotide, but may still bind or otherwise form complex with the target polynucleotide.

[0142] In an embodiment, the IscB comprises one or more mutation in the HNH domain of the polypeptide, or in the RuvC-II of the polypeptide. In an embodiment, the IscB polypeptide comprises a mutation of the catalytic RuvC-II residue corresponding to E157 to alanine (E157A) in A. warmingii. In an aspect, the mutation of a catalytic RuvC-II residue abolishes the nucleolytic activity on the non-target DNA strand. In an embodiment, the IscB polypeptide comprises a mutation of the catalytic HNH residue corresponding to H212 to alanine (H212A) in A. warmingii. In one embodiment, the mutation of the catalytic HNH residue abolishes nucleolytic activity on the target DNA strand. In an aspect, the IscB comprises a mutation corresponding to both E157A and H212A of A. warmingii, or corresponding to the positions according to consensus sequence numbering relative to A. warmingii. In an embodiment, mutation at both an HNH domain and RuvC abolishes all dsDNA nucleolytic activity, providing a dead IscB polypeptide (dIscB).

[0143] In one embodiment, the modifications of the IscB polypeptide may or may not cause an altered functionality. By means of example, modifications which do not result in an altered functionality include for instance codon optimization for expression into a particular host, or providing the nuclease with a particular marker (e.g., for visualization). Modifications which may result in altered functionality may also include mutations, including point mutations, insertions, deletions, truncations (including split nucleases), etc., as well as chimeric nucleases (e.g., comprising domains from different orthologues or homologues) or fusion proteins. A chimeric enzyme can comprise a first fragment and a second fragment, and the fragments can be of IscB polypeptide nuclease orthologs of organisms of a genus or of a species, e.g., the fragments are from IscB polypeptide nuclease orthologs of different species. Fusion proteins may without limitation include, for instance, fusions with heterologous domains or functional domains (e.g., localization signals, catalytic domains, etc.). In an embodiment, various different modifications may be combined (e.g., a mutated nuclease which is catalytically inactive and which further is fused to a functional domain, such as for instance to induce DNA methylation or another nucleic acid modification, such as including without limitation, a break (e.g. by a different nuclease (domain)), a mutation, a deletion, an insertion, a replacement, a ligation, a digestion, a break or a recombination). As used herein, “altered functionality” includes without limitation an altered specificity (e.g., altered target recognition, increased (e.g., “enhanced” IscB polypeptide nuclease) or decreased specificity, or altered TAM recognition), altered activity (e.g., increased or decreased catalytic activity, including catalytically inactive nucleases or nickases), and/or altered stability (e.g., fusions with destabilization domains). Examples of all these modifications are known in the art. It will be understood that a “modified” nuclease as referred to herein, and in particular a “modified” IscB polypeptide nuclease or system or complex preferably still has the capacity to interact with or bind to the polynucleic acid (e.g., in complex with the ωRNA molecule). Such modified IscB polypeptide nuclease can be combined with the deaminase protein or active domain thereof as described herein.

[0144] In one embodiment, unmodified IscB polypeptide nucleases may have cleavage activity. In one embodiment, the IscB polypeptide nucleases may direct cleavage of one or both DNA strands at the location of or near a target sequence, such as within the target sequence and/or within the complement of the target sequence or at sequences associated with the target sequence. In one embodiment, the IscB polypeptide nucleases may direct cleavage of one or both strands within about 1, 2, 3, 4, 5, 6, 7, 8, 9, 10, 15, 20, 25, 50, 100, 200, 500, or more base pairs or nucleotides from the first or last nucleotide of a target sequence. In one embodiment, the cleavage may be staggered, i.e., generating sticky ends. In one embodiment, the cleavage is a staggered cut with a 5′ overhang. In one embodiment, the cleavage is a staggered cut with a 5′ overhang of 1 to 15 nucleotides, preferably of 4 or 9 nucleotides.

[0145] In one embodiment, the cleavage site is distant from the Target Adjacent Motif (TAM), which is used interchangeably with the term PAM herein, e.g., the cleavage occurs after the nth nucleotide on the non-target strand and after the nucleotide on the targeted strand. In one embodiment, the cleavage site occurs after an identified nucleotide (counted from the TAM) on the non-target strand and after the further identified nucleotide (counted from the TAM) on the targeted strand. In one embodiment, a vector encodes a nucleic acid-targeting effector protein that may be mutated with respect to a corresponding wild-type enzyme such that the mutated nucleic acid-targeting effector protein lacks the ability to cleave one or both DNA and RNA strands of a target polynucleotide containing a target sequence. As a further example, two or more catalytic domains of a IscB polypeptide nuclease (e.g., RuvC I, RuvC II, and RuvC III or the HNH domain) may be mutated to produce a mutated IscB polypeptide nuclease substantially lacking all DNA cleavage activity. As described herein, corresponding catalytic domains of a IscB polypeptide nuclease may also be mutated to produce a mutated IscB polypeptide nuclease lacking all DNA cleavage activity or having substantially reduced DNA cleavage activity. In one embodiment, a IscB polypeptide nuclease may be considered to substantially lack all polynucleotide cleavage activity when the polynucleotide cleavage activity of the mutated enzyme is no more than 25%, no more than 10%, no more than 5%, no more than 1%, no more than 0.1%, no more than 0.01% of the nucleic acid cleavage activity of the non-mutated form of the enzyme; an example can be when the nucleic acid cleavage activity of the mutated form is nil or negligible as compared with the non-mutated form. A IscB polypeptide nuclease may be identified with reference to the general class of enzymes that share homology to the biggest nuclease with multiple nuclease domains from the Type I, II, III, IV, V, or VI CRISPR systems.

[0146] TAM identification and specificity may be identified, for example, using the methods disclosed in the Examples section below.

[0147] In an embodiment, the nuclease domains of the IscB polypeptide nuclease are catalytically inactive, or modified to be catalytically inactive, or when the protein is a nickase. In an embodiment, both nuclease domains are catalytically inactive.

[0148] In an embodiment, the IscB polypeptide nuclease may comprise one or more modifications resulting in enhanced activity and/or specificity, such as including mutating residues that stabilize the targeted or non-targeted strand. In an embodiment, the altered or modified activity of the engineered IscB polypeptide nuclease comprises increased targeting efficiency or decreased off-target binding. In an embodiment, the altered activity of the engineered IscB polypeptide nuclease comprises modified cleavage activity. In an embodiment, the altered activity comprises increased cleavage activity as to the target polynucleotide loci. In an embodiment, the altered activity comprises decreased cleavage activity as to the target polynucleotide loci. In an embodiment, the altered activity comprises decreased cleavage activity as to off-target polynucleotide loci. In an embodiment, the altered or modified activity of the modified nuclease comprises altered helicase kinetics. In an embodiment, the modified nuclease comprises a modification that alters association of the protein with the nucleic acid molecule comprising RNA, or a strand of the target polynucleotide loci, or a strand of off-target polynucleotide loci. In an aspect of the invention, the engineered IscB polypeptide nuclease comprises a modification that alters formation of the IscB polypeptide nuclease and related complex. In an embodiment, the altered activity comprises increased cleavage activity as to off-target polynucleotide loci. Accordingly, in an embodiment, there is increased specificity for target polynucleotide loci as compared to off-target polynucleotide loci. In other embodiments, there is reduced specificity for target polynucleotide loci as compared to off-target polynucleotide loci. In an embodiment, the mutations result in decreased off-target effects (e.g., cleavage or binding properties, activity, or kinetics), such as in case for IscB polypeptide nuclease for instance resulting in a lower tolerance for mismatches between target and ωRNA. Other mutations may lead to increased off-target effects (e.g., cleavage or binding properties, activity, or kinetics). Other mutations may lead to increased or decreased on-target effects (e.g., cleavage or binding properties, activity, or kinetics). In an embodiment, the mutations result in altered (e.g., increased or decreased) helicase activity, association or formation of the functional nuclease complex. In an embodiment, the mutations result in an altered TAM recognition, i.e., a different TAM may be (in addition or in the alternative) be recognized, compared to the unmodified IscB polypeptide nuclease. Examples mutations include positively charged residues and/or (evolutionary) conserved residues, such as conserved positively charged residues, in order to enhance specificity. In an embodiment, such residues may be mutated to uncharged residues, such as alanine.

### ωRNA Molecules

[0149] The systems herein may further comprise one or more ωRNA molecules, which are referred to herein interchangeably as ωRNA. The ωRNA complex can comprise a guide sequence and a scaffold that interacts with the IscB polypeptide. An ωRNA molecule may form a complex with IscB polypeptide nuclease or IscB polypeptide, and direct the complex to bind with a target sequence. In certain example embodiments, the ωRNA molecule is a single molecule comprising a scaffold sequence and a spacer sequence. In certain example embodiments, the spacer is 5′ of the scaffold sequence. In certain example embodiments, the ωRNA molecule may further comprise a conserved nucleic acid sequence between the scaffold and spacer portions.

[0150] In certain example embodiments, the ωRNA scaffold comprises a spacer sequence and a conserved nucleotide sequence. The ωRNA scaffold typically comprises conserved regions, with the scaffold comprising 30, 31, 32, 33, 34, 35, 36, 37, 38, 39 40, 41, 42, 43, 44, 45, 46, 47 48, 49, 50, 51, 52, 53, 54, 55, 56, 57, 58, 59, 60, 61, 62, 63, 64, 65, 66, 67, 68, 69, 70, 71, 72, 73, 74, 75, 76, 77, 78, 79, 80, 81, 82, 83, 84, 85, 86, 87, 88, 89, 90, 91, 92, 93, 94, 95, 96, 97, 98, 99, 100, 105, 115, 125, 135, 145, 155, 165, 175, 185, 195, 205, 215, 225, 235, 245, 255, 265, 275, 285, 295, 305, 315, 325, 335, 345, or 355 or more nt. In an aspect, the ωRNA scaffold comprises one conserved nucleotide sequence. In embodiments, the conserved nucleotide sequence is on or near a 5′ end of the scaffold. In embodiments, the scaffold may comprise a short 3-4 base pairnexus, a conserved nexus hairpin and a large multi-stem loop region that may consist of two interconnected multi-stem loops. In an aspect, an IscrB associated scaffold may comprise a spacer, which can be re-programmed to direct site-specific binding to a target sequence of a target polynucleotide. The spacer may also be referred to herein as part of the ωRNA scaffold or as gRNA, and may comprise an engineered heterologous sequence. In an embodiment the scaffold may comprise a sequence from Table 1.

[0151] In an embodiment, the spacer length of the ωRNA is from 10 to 150 nt. In an embodiment, the spacer length of the guide RNA is at least 15 nucleotides. In an embodiment, the spacer length is from 15 to 17 nt, e.g., 15, 16, or 17 nt, from 17 to 20 nt, e.g., 17, 18, 19, or 20 nt, from 20 to 24 nt, e.g., 20, 21, 22, 23, or 24 nt, from 23 to 25 nt, e.g., 23, 24, or 25 nt, from 24 to 27 nt, e.g., 24, 25, 26, or 27 nt, from 27 to 30 nt, e.g., 27, 28, 29, or 30 nt, from 30 to 35 nt, e.g., 30, 31, 32, 33, 34, or 35 nt, or 35 nt or longer. In certain example embodiment, the guide sequence is 15, 16, 17, 18, 19, 20, 21, 22, 23, 24, 25, 26, 27, 28, 29, 30, 31, 32, 33, 34, 35, 36, 37, 38, 39 40, 41, 42, 43, 44, 45, 46, 47 48, 49, 50, 51, 52, 53, 54, 55, 56, 57, 58, 59, 60, 61, 62, 63, 64, 65, 66, 67, 68, 69, 70, 71, 72, 73, 74, 75, 76, 77, 78, 79, 80, 81, 82, 83, 84, 85, 86, 87, 88, 89, 90, 91, 92, 93, 94, 95, 96, 97, 98, 99, 100, 101, 102, 103, 104, 105, 106, 107, 108, 109, 110, 111, 112, 113, 114, 115, 116, 117, 118, 119, 120, 121, 122, 123, 124, 125, 126, 127, 128, 129, 130, 131, 132, 133, 134, 135, 136, 17, 138, 19, 140, 141, 142, 143, 144, 145, 146, 147, 148, 149 or 150 nt.

[0152] In an embodiment, the ωRNA spacer length is from 15 to 50 nt. In an embodiment, the spacer length of the ωRNA is at least 15 nucleotides. In an embodiment, the spacer length is from 15 to 50 nt, e.g., 15, 16, or 17 nt, from 17 to 20 nt, e.g., 17, 18, 19, or 20 nt, from 20 to 24 nt, e.g., 20, 21, 22, 23, or 24 nt, from 23 to 25 nt, e.g., 23, 24, or 25 nt, from 24 to 27 nt, e.g., 24, 25, 26, or 27 nt, from 27 to 30 nt, e.g., 27, 28, 29, or 30 nt, from 30 to 35 nt, e.g., 30, 31, 32, 33, 34, or 35 nt, or 35 nt, from 34 to 40 nt, e.g., 34, 35, 36, 37, 38, 39, 40, from 35 to 39, from 36 to 38 nt long, about 37 nt, or longer.

[0153] In one embodiment, the sequence of the ωRNA molecule is selected to reduce the degree secondary structure within the ωRNA molecule. In one embodiment, about or less than about 75%, 50%, 40%, 30%, 25%, 20%, 15%, 10%, 5%, 1%, or fewer of the nucleotides of the nucleic acid-targeting ωRNA participate in self-complementary base pairing when optimally folded. Optimal folding may be determined by any suitable polynucleotide folding algorithm. Some programs are based on calculating the minimal Gibbs free energy. An example of one such algorithm is mFold, as described by Zuker and Stiegler (Nucleic Acids Res. 9 (1981), 133-148). Another example of a folding algorithm is the online webserver RNAfold, developed at Institute for Theoretical Chemistry at the University of Vienna, using the centroid structure prediction algorithm (see e.g., A. R. Gruber et al., 2008, Cell 106(1): 23-24; and PA Carr and G M Church, 2009, Nature Biotechnology 27(12): 1151-62).

[0154] As used herein, a heterologous ωRNA molecule is an ωRNA molecule that is not derived from the same species as the IscB polypeptide nuclease, or comprises a portion of the molecule, e.g., spacer, that is not derived from the same species as the IscB polypeptide nuclease, e.g. IscB protein. For example, a heterologous ωRNA molecule of a IscB polypeptide nuclease derived from species A comprises a polynucleotide derived from a species different from species A, or an artificial polynucleotide.

[0155] In a particular embodiment, the ωRNA comprises a guide sequence linked to a conserved nucleotide sequence, wherein the conserved nucleotide sequence may comprise one or more stem loops or optimized secondary structures. In an embodiment, the conserved nucleotide sequence has a minimum length of 16 nts and a single stem loop. In further embodiments the conserved nucleotide sequence has a length longer than 16 nts, preferably more than 17 nts, and has more than one stem loops or optimized secondary structures. In one embodiment an embodiment, the guide sequence may be linked to all or part of the natural conserved nucleotide sequence. In one embodiment one embodiment, certain aspects of the guide architecture can be modified, for example by addition, subtraction, or substitution of features, whereas certain other aspects of guide architecture are maintained. Preferred locations for engineered guide modifications, including but not limited to insertions, deletions, and substitutions include guide termini and regions of the guide that are exposed when complexed with IscB polypeptide nuclease and/or target, for example the tetraloop and/or loop2.

[0156] In one embodiment, a loop in the guide RNA is provided. This may be a stem loop or a tetra loop. The loop is preferably GAAA, but it is not limited to this sequence or indeed to being only 4 bp in length. Indeed, preferred loop forming sequences for use in hairpin structures are four nucleotides in length, and most preferably have the sequence GAAA. However, longer or shorter loop sequences may be used, as may alternative sequences. The sequences preferably include a nucleotide triplet (for example, AAA), and an additional nucleotide (for example C or G). Examples of loop forming sequences include CAAA and AAAG.

[0157] In one embodiment, the ωRNA forms a stemloop with a separate non-covalently linked sequence, which can be DNA or RNA. In an embodiment, the sequences forming the guide are first synthesized using the standard phosphoramidite synthetic protocol (Herdewijn, P., ed., Methods in Molecular Biology Col 288, Oligonucleotide Synthesis: Methods and Applications, Humana Press, New Jersey (2012)). In one embodiment, these sequences can be functionalized to contain an appropriate functional group for ligation using the standard protocol known in the art (Hermanson, G. T., Bioconjugate Techniques, Academic Press (2013)). Examples of functional groups include, but are not limited to, hydroxyl, amine, carboxylic acid, carboxylic acid halide, carboxylic acid active ester, aldehyde, carbonyl, chlorocarbonyl, imidazolylcarbonyl, hydrozide, semicarbazide, thio semicarbazide, thiol, maleimide, haloalkyl, sufonyl, ally, propargyl, diene, alkyne, and azide. Once this sequence is functionalized, a covalent chemical bond or linkage can be formed between this sequence and the conserved nucleotide sequence. Examples of chemical bonds include, but are not limited to, those based on carbamates, ethers, esters, amides, imines, amidines, aminotrizines, hydrozone, disulfides, thioethers, thioesters, phosphorothioates, phosphorodithioates, sulfonamides, sulfonates, fulfones, sulfoxides, ureas, thioureas, hydrazide, oxime, triazole, photolabile linkages, C—C bond forming groups such as Diels-Alder cyclo-addition pairs or ring-closing metathesis pairs, and Michael reaction pairs.

[0158] In one embodiment, these stem-loop forming sequences can be chemically synthesized. In one embodiment, the chemical synthesis uses automated, solid-phase oligonucleotide synthesis machines with 2′-acetoxyethyl orthoester (2′-ACE) (Scaringe et al., J. Am. Chem. Soc. (1998) 120: 11820-11821; Scaringe, Methods Enzymol. (2000) 317: 3-18) or 2′-thionocarbamate (2′-TC) chemistry (Dellinger et al., J. Am. Chem. Soc. (2011) 133: 11540-11546; Hendel et al., Nat. Biotechnol. (2015) 33:985-989).

[0159] The repeat:anti repeat duplex will be apparent from the secondary structure of the ωRNA. It may be typically a first complimentary stretch after (in 5′ to 3′ direction) the poly U tract and before the tetraloop; and a second complimentary stretch after (in 5′ to 3′ direction) the tetraloop and before the poly A tract. The first complimentary stretch (the “repeat”) is complimentary to the second complimentary stretch (the “anti-repeat”). As such, they Watson-Crick base pair to form a duplex of dsRNA when folded back on one another. As such, the anti-repeat sequence is the complimentary sequence of the repeat and in terms to A-U or C-G base pairing, but also in terms of the fact that the anti-repeat is in the reverse orientation due to the tetraloop.

[0160] In an embodiment of the invention, modification of guide architecture comprises replacing bases in stemloop 2. For example, In one embodiment, “actt” (“acuu” in RNA) and “aagt” (“aagu” in RNA) bases in stemloop2 are replaced with “cgcc” and “gcgg”. In one embodiment, “actt” and “aagt” bases in stemloop2 are replaced with complimentary GC-rich regions of 4 nucleotides. In one embodiment, the complimentary GC-rich regions of 4 nucleotides are “cgcc” and “gcgg” (both in 5′ to 3′ direction). In one embodiment, the complimentary GC-rich regions of 4 nucleotides are “gcgg” and “cgcc” (both in 5′ to 3′ direction). Other combination of C and G in the complimentary GC-rich regions of 4 nucleotides will be apparent including CCCC and GGGG.

[0161] In one aspect, the stemloop 2, e.g., “ACTTgtttAAGT” (SEQ ID NO: 1) can be replaced by any “XXXXgtttYYYY” (SEQ ID NO: 2), e.g., where XXXX and YYYY represent any complementary sets of nucleotides that together will base pair to each other to create a stem.

[0162] As used herein, the term “spacer” may also be referred to as a “guide sequence.” In one embodiment, the degree of complementarity of the guide quence to a given target sequence, when optimally aligned using a suitable alignment algorithm, is about or more than 50%, 60%, 75%, 80%, 85%, 90%, 95%, 97.5%, 99%, or more. In certain example embodiments, the ωRNA molecule comprises a guide sequence that may be designed to have at least one mismatch with the target sequence, such that a RNA duplex formed between the sequence and the target sequence. Accordingly, the degree of complementarity is less than 99%. For instance, where the guide sequence consists of 24 nucleotides, the degree of complementarity is more particularly about 96% or less. In one embodiment, the guide sequence is designed to have a stretch of two or more adjacent mismatching nucleotides, such that the degree of complementarity over the entire sequence is further reduced. For instance, where the guide sequence consists of 24 nucleotides, the degree of complementarity is more particularly about 96% or less, more particularly, about 92% or less, more particularly about 88% or less, more particularly about 84% or less, more particularly about 80% or less, more particularly about 76% or less, more particularly about 72% or less, depending on whether the stretch of two or more mismatching nucleotides encompasses 2, 3, 4, 5, 6 or 7 nucleotides, etc. In one embodiment, aside from the stretch of one or more mismatching nucleotides, the degree of complementarity, when optimally aligned using a suitable alignment algorithm, is about or more than about 50%, 60%, 75%, 80%, 85%, 90%, 95%, 97.5%, 99%, or more. Optimal alignment may be determined with the use of any suitable algorithm for aligning sequences, non-limiting example of which include the Smith-Waterman algorithm, the Needleman-Wunsch algorithm, algorithms based on the Burrows-Wheeler Transform (e.g., the Burrows Wheeler Aligner), ClustalW, Clustal X, BLAT, Novoalign (Novocraft Technologies; available at novocraft.com), ELAND (Illumina, San Diego, CA), SOAP (available at soap.genomics.org.cn), and Maq (available at maq.sourceforge.net). The ability of a sequence (within a nucleic acid-targeting guide sequence) to direct sequence-specific binding of a nucleic acid-targeting complex to a target nucleic acid sequence may be assessed by any suitable assay. For example, the components of a ωRNA system sufficient to form a nucleic acid-targeting complex, including the guide sequence to be tested, may be provided to a host cell having the corresponding target nucleic acid sequence, such as by transfection with vectors encoding the components of the nucleic acid-targeting complex, followed by an assessment of preferential targeting (e.g., cleavage) within the target nucleic acid sequence, such as by Surveyor assay as described herein. Similarly, cleavage of a target nucleic acid sequence (or a sequence in the vicinity thereof) may be evaluated in a test tube by providing the target nucleic acid sequence, components of a nucleic acid-targeting complex, including the sequence to be tested and a control sequence different from the test guide sequence, and comparing binding or rate of cleavage at or in the vicinity of the target sequence between the test and control guide sequence reactions. Other assays are possible, and will occur to those skilled in the art. A guide sequence, and hence a nucleic acid-targeting ωRNA may be selected to target any target nucleic acid sequence.

[0163] A ωRNA sequence, and hence a nucleic acid-targeting guide, may be selected to target any target nucleic acid sequence. The target sequence may be DNA. The target sequence may be any RNA sequence. In one embodiment, the target sequence may be a sequence within a RNA molecule selected from the group consisting of messenger RNA (mRNA), pre-mRNA, ribosomal RNA (rRNA), transfer RNA (tRNA), micro-RNA (miRNA), small interfering RNA (siRNA), small nuclear RNA (snRNA), small nucleolar RNA (snoRNA), double stranded RNA (dsRNA), non-coding RNA (ncRNA), long non-coding RNA (lncRNA), and small cytoplasmatic RNA (scRNA). In some preferred embodiments, the target sequence may be a sequence within a RNA molecule selected from the group consisting of mRNA, pre-mRNA, and rRNA. In some preferred embodiments, the target sequence may be a sequence within a RNA molecule selected from the group consisting of ncRNA, and lncRNA. In some more preferred embodiments, the target sequence may be a sequence within an mRNA molecule or a pre-mRNA molecule.

[0164] In one embodiment, the ωRNA molecule forms a stemloop with a separate non-covalently linked sequence, which can be DNA or RNA. In one embodiment, the sequences forming the ωRNA are first synthesized using the standard phosphoramidite synthetic protocol (Herdewijn, P., ed., Methods in Molecular Biology Col 288, Oligonucleotide Synthesis: Methods and Applications, Humana Press, New Jersey (2012)). In one embodiment, these sequences can be functionalized to contain an appropriate functional group for ligation using the standard protocol known in the art (Hermanson, G. T., Bioconjugate Techniques, Academic Press (2013)). Examples of functional groups include, but are not limited to, hydroxyl, amine, carboxylic acid, carboxylic acid halide, carboxylic acid active ester, aldehyde, carbonyl, chlorocarbonyl, imidazolylcarbonyl, hydrozide, semicarbazide, thio semicarbazide, thiol, maleimide, haloalkyl, sufonyl, ally, propargyl, diene, alkyne, and azide. Once this sequence is functionalized, a covalent chemical bond or linkage can be formed between this sequence and the conserved nucleotide sequence. Examples of chemical bonds include, but are not limited to, those based on carbamates, ethers, esters, amides, imines, amidines, aminotrizines, hydrozone, disulfides, thioethers, thioesters, phosphorothioates, phosphorodithioates, sulfonamides, sulfonates, fulfones, sulfoxides, ureas, thioureas, hydrazide, oxime, triazole, photolabile linkages, C—C bond forming groups such as Diels-Alder cyclo-addition pairs or ring-closing metathesis pairs, and Michael reaction pairs.

[0165] In one embodiment, these stem-loop forming sequences can be chemically synthesized. In one embodiment, the chemical synthesis uses automated, solid-phase oligonucleotide synthesis machines with 2′-acetoxyethyl orthoester (2′-ACE) (Scaringe et al., J. Am. Chem. Soc. (1998) 120: 11820-11821; Scaringe, Methods Enzymol. (2000) 317: 3-18) or 2′-thionocarbamate (2′-TC) chemistry (Dellinger et al., J. Am. Chem. Soc. (2011) 133: 11540-11546; Hendel et al., Nat. Biotechnol. (2015) 33:985-989).

[0166] In an embodiment, the ωRNA molecule comprises non-naturally occurring nucleic acids and/or non-naturally occurring nucleotides and/or nucleotide analogs, and/or chemically modifications. Preferably, these non-naturally occurring nucleic acids and non-naturally occurring nucleotides are located outside the ωRNA sequence. Non-naturally occurring nucleic acids can include, for example, mixtures of naturally and non-naturally occurring nucleotides. Non-naturally occurring nucleotides and/or nucleotide analogs may be modified at the ribose, phosphate, and/or base moiety. In an embodiment of the invention, a ωRNA nucleic acid comprises ribonucleotides and non-ribonucleotides. In one such embodiment, a ωRNA comprises one or more ribonucleotides and one or more deoxyribonucleotides. In an embodiment of the invention, the ωRNA comprises one or more non-naturally occurring nucleotide or nucleotide analog such as a nucleotide with phosphorothioate linkage, a locked nucleic acid (LNA) nucleotides comprising a methylene bridge between the 2′ and 4′ carbons of the ribose ring, or bridged nucleic acids (BNA). Other examples of modified nucleotides include 2′-O-methyl analogs, 2′-deoxy analogs, or 2′-fluoro analogs. Further examples of modified bases include, but are not limited to, 2-aminopurine, 5-bromo-uridine, pseudouridine, inosine, 7-methylguanosine. Examples of ωRNA chemical modifications include, without limitation, incorporation of 2′-O-methyl (M), 2′-O-methyl 3′phosphorothioate (MS), S-constrained ethyl(cEt), or 2′-O-methyl 3′thioPACE (MSP) at one or more terminal nucleotides. Such chemically modified ωRNA can comprise increased stability and increased activity as compared to unmodified ωRNA, though on-target vs. off-target specificity is not predictable. (See, Hendel, 2015, Nat Biotechnol. 33(9):985-9, doi: 10.1038/nbt.3290, published online 29 Jun. 2015 Ragdarm et al., 0215, PNAS, E7110-E7111; Allerson et al., J. Med. Chem. 2005, 48:901-904; Bramsen et al., Front. Genet., 2012, 3:154; Deng et al., PNAS, 2015, 112:11870-11875; Sharma et al., MedChemComm., 2014, 5:1454-1471; Hendel et al., Nat. Biotechnol. (2015) 33(9): 985-989; Li et al., Nature Biomedical Engineering, 2017, 1, 0066 DOI:10.1038/s41551-017-0066). In one embodiment, the 5′ and/or 3′ end of a ωRNA is modified by a variety of functional moieties including fluorescent dyes, polyethylene glycol, cholesterol, proteins, or detection tags. (See Kelly et al., 2016, J. Biotech. 233:74-83). In an embodiment, a ωRNA comprises ribonucleotides in a region that binds to a target sequence and one or more deoxyribonucletides and/or nucleotide analogs in a region that binds to the IscB polypeptide nuclease. In an embodiment, deoxyribonucleotides and/or nucleotide analogs are incorporated in engineered hRNA structures. In one embodiment, 3-5 nucleotides at either the 3′ or the 5′ end of a hRNA is chemically modified. In one embodiment, only minor modifications are introduced in the seed region, such as 2′-F modifications. In one embodiment, 2′-F modification is introduced at the 3′ end of a hRNA. In an embodiment, three to five nucleotides at the 5′ and/or the 3′ end of the hRNA are chemically modified with 2′-O-methyl (M), 2′-O-methyl 3′ phosphorothioate (MS), S-constrained ethyl(cEt), or 2′-O-methyl 3′ thioPACE (MSP). Such modification can enhance genome editing efficiency (see Hendel et al., Nat. Biotechnol. (2015) 33(9): 985-989). In an embodiment, all of the phosphodiester bonds of a hRNA are substituted with phosphorothioates (PS) for enhancing levels of gene disruption. In an embodiment, more than five nucleotides at the 5′ and/or the 3′ end of the hRNA are chemically modified with 2′-O-Me, 2′-F or S-constrained ethyl(cEt). Such chemically modified hRNA can mediate enhanced levels of gene disruption (see Ragdarm et al., 0215, PNAS, E7110-E7111). In an embodiment of the invention, a hRNA is modified to comprise a chemical moiety at its 3′ and/or 5′ end. Such moieties include, but are not limited to amine, azide, alkyne, thio, dibenzocyclooctyne (DBCO), or Rhodamine. In certain embodiment, the chemical moiety is conjugated to the hRNA by a linker, such as an alkyl chain. In an embodiment, the chemical moiety of the modified hRNA can be used to attach the hRNA to another molecule, such as DNA, RNA, protein, or nanoparticles. Such chemically modified hRNA can be used to identify or enrich cells generically edited by a IscB polypeptide nuclease and related systems (see Lee et al., eLife, 2017, 6:e25312, DOI:10.7554).

[0167] In a particular embodiment, the conserved nucleotide sequence may be modified to comprise one or more protein-binding RNA aptamers. In a particular embodiment, one or more aptamers may be included such as part of optimized secondary structure. Such aptamers may be capable of binding a bacteriophage coat protein as detailed further herein.

[0168] In embodiments, the IscB polypeptide utilizes the hRNA scaffold comprising a polynucleotide sequence that facilitates the interaction with the IscB protein, allowing for sequence specific binding and/or targeting of the guide sequence with the target polynucleotide. Chemical synthesis of the hRNA scaffold is contemplated, using covalent linkage using various bioconjugation reactions, loops, bridges, and non-nucleotide links via modifications of sugar, internucleotide phosphodiester bonds, purine and pyrimidine residues. Sletten et al., Angew. Chem. Int. Ed. (2009) 48:6974-6998; Manoharan, M. Curr. Opin. Chem. Biol. (2004) 8: 570-9; Behlke et al., Oligonucleotides (2008) 18: 305-19; Watts, et al., Drug. Discov. Today (2008) 13: 842-55; Shukla, et al., ChemMedChem (2010) 5: 328-49; chemical synthesis using automated, solid-phase oligonucleotide synthesis machines with 2′-acetoxyethyl orthoester (2′-ACE) (Scaringe et al., J. Am. Chem. Soc. (1998) 120: 11820-11821; Scaringe, Methods Enzymol. (2000) 317: 3-18) or 2′-thionocarbamate (2′-TC) chemistry (Dellinger et al., J. Am. Chem. Soc. (2011) 133: 11540-11546; Hendel et al., Nat. Biotechnol. (2015) 33:985-989).

[0169] In certain example embodiments, the scaffold and spacer may designed as two separate molecules that can hybridize or covalently joined into a single molecule. Covalent linkage can be via a linker (e.g., a non-nucleotide loop) that comprises a moiety such as spacers, attachments, bioconjugates, chromophores, reporter groups, dye labeled RNAs, and non-naturally occurring nucleotide analogues. More specifically, suitable spacers for purposes of this invention include, but are not limited to, polyethers (e.g., polyethylene glycols, polyalcohols, polypropylene glycol or mixtures of efhylene and propylene glycols), polyamines group (e.g., spennine, spermidine and polymeric derivatives thereof), polyesters (e.g., poly(ethyl acrylate)), polyphosphodiesters, alkylenes, and combinations thereof. Suitable attachments include any moiety that can be added to the linker to add additional properties to the linker, such as but not limited to, fluorescent labels. Suitable bioconjugates include, but are not limited to, peptides, glycosides, lipids, cholesterol, phospholipids, diacyl glycerols and dialkyl glycerols, fatty acids, hydrocarbons, enzyme substrates, steroids, biotin, digoxigenin, carbohydrates, polysaccharides. Suitable chromophores, reporter groups, and dye-labeled RNAs include, but are not limited to, fluorescent dyes such as fluorescein and rhodamine, chemiluminescent, electrochemiluminescent, and bioluminescent marker compounds. The design of example linkers conjugating two RNA components are also described in WO 2004/015075.

[0170] The linker (e.g., a non-nucleotide loop) can be of any length. In one embodiment, the linker has a length equivalent to about 0-16 nucleotides. In one embodiment, the linker has a length equivalent to about 0-8 nucleotides. In one embodiment, the linker has a length equivalent to about 0-4 nucleotides. In one embodiment, the linker has a length equivalent to about 2 nucleotides. Example linker design is also described in International Patent Publication No. WO 2011/008730.

### Escorted ωRNA Molecules

[0171] In one embodiment, the compositions or complexes have a hRNA molecule with a functional structure designed to improve hRNA molecule structure, architecture, stability, genetic expression, or any combination thereof. Such a structure can include an aptamer.

[0172] Aptamers are biomolecules that can be designed or selected to bind tightly to other ligands, for example using a technique called systematic evolution of ligands by exponential enrichment (SELEX; Tuerk C, Gold L: “Systematic evolution of ligands by exponential enrichment: RNA ligands to bacteriophage T4 DNA polymerase.” Science 1990, 249:505-510). Nucleic acid aptamers can for example be selected from pools of random-sequence oligonucleotides, with high binding affinities and specificities for a wide range of biomedically relevant targets, suggesting a wide range of therapeutic utilities for aptamers (Keefe, Anthony D., Supriya Pai, and Andrew Ellington. “Aptamers as therapeutics.” Nature Reviews Drug Discovery 9.7 (2010): 537-550). These characteristics also suggest a wide range of uses for aptamers as drug delivery vehicles (Levy-Nissenbaum, Etgar, et al. “Nanotechnology and aptamers: applications in drug delivery.” Trends in biotechnology 26.8 (2008): 442-449; and Hicke B J, Stephens A W. “Escort aptamers: a delivery service for diagnosis and therapy.” J Clin Invest 2000, 106:923-928.). Aptamers may also be constructed that function as molecular switches, responding to a que by changing properties, such as RNA aptamers that bind fluorophores to mimic the activity of green fluorescent protein (Paige, Jeremy S., Karen Y. Wu, and Samie R. Jaffrey. “RNA mimics of green fluorescent protein.” Science 333.6042 (2011): 642-646). It has also been suggested that aptamers may be used as components of targeted siRNA therapeutic delivery systems, for example targeting cell surface proteins (Zhou, Jiehua, and John J. Rossi. “Aptamer-targeted cell-specific RNA interference.” Silence 1.1 (2010): 4).

[0173] Accordingly, in one embodiment, the hRNA molecule is modified, e.g., by one or more aptamer(s) designed to improve hRNA molecule delivery, including delivery across the cellular membrane, to intracellular compartments, or into the nucleus. Such a structure can include, either in addition to the one or more aptamer(s) or without such one or more aptamer(s), moiety(ies) so as to render the hRNA molecule deliverable, inducible or responsive to a selected effector. The invention accordingly comprehends a hRNA molecule that responds to normal or pathological physiological conditions, including without limitation pH, hypoxia, 02 concentration, temperature, protein concentration, enzymatic concentration, lipid structure, light exposure, mechanical disruption (e.g., ultrasound waves), magnetic fields, electric fields, or electromagnetic radiation.

[0174] Light responsiveness of an inducible system may be achieved via the activation and binding of cryptochrome-2 and CIB1. Blue light stimulation induces an activating conformational change in cryptochrome-2, resulting in recruitment of its binding partner CIB1. This binding is fast and reversible, achieving saturation in <15 sec following pulsed stimulation and returning to baseline <15 min after the end of stimulation. These rapid binding kinetics result in a system temporally bound only by the speed of transcription/translation and transcript/protein degradation, rather than uptake and clearance of inducing agents. Crytochrome-2 activation is also highly sensitive, allowing for the use of low light intensity stimulation and mitigating the risks of phototoxicity. Further, in a context such as the intact mammalian brain, variable light intensity may be used to control the size of a stimulated region, allowing for greater precision than vector delivery alone may offer.

[0175] Energy sources such as electromagnetic radiation, sound energy or thermal energy may induce the guide. Advantageously, the electromagnetic radiation is a component of visible light. In a preferred embodiment, the light is a blue light with a wavelength of about 450 to about 495 nm. In an especially preferred embodiment, the wavelength is about 488 nm. In another preferred embodiment, the light stimulation is via pulses. The light power may range from about 0-9 mW/cm2. In a preferred embodiment, a stimulation paradigm of as low as 0.25 sec every 15 sec should result in maximal activation.

[0176] The chemical or energy sensitive hRNA may undergo a conformational change upon induction by the binding of a chemical source or by the energy allowing it act as a hRNA and have the IscB polypeptide nuclease system or complex function. The invention can involve applying the chemical source or energy so as to have the hRNA function and the IscB polypeptide nuclease system or complex function; and optionally further determining that the expression of the genomic locus is altered.

[0177] There are several different designs of this chemical inducible system: 1. ABI-PYL based system inducible by Abscisic Acid (ABA) (see, e.g., stke.sciencemag.org/cgi/content/abstract/sigtrans; 4/164/rs2), 2. FKBP-FRB based system inducible by rapamycin (or related chemicals based on rapamycin) (see, e.g., www.nature.com/nmeth/journal/v2/n6/full/nmeth763.html), 3. GID1-GAI based system inducible by Gibberellin (GA) (see, e.g., www.nature.com/nchembio/journal/v8/n5/full/nchembio.922.html).

[0178] A chemical inducible system can be an estrogen receptor (ER) based system inducible by 4-hydroxytamoxifen (4OHT) (see, e.g., www.pnas.org/content/104/3/1027.abstract). A mutated ligand-binding domain of the estrogen receptor called ERT2 translocates into the nucleus of cells upon binding of 4-hydroxytamoxifen. In further embodiments of the invention any naturally occurring or engineered derivative of any nuclear receptor, thyroid hormone receptor, retinoic acid receptor, estrogen receptor, estrogen-related receptor, glucocorticoid receptor, progesterone receptor, androgen receptor may be used in inducible systems analogous to the ER based inducible system.

[0179] Another inducible system is based on the design using Transient receptor potential (TRP) ion channel-based system inducible by energy, heat or radio-wave (see, e.g., www.sciencemag.org/content/336/6081/604). These TRP family proteins respond to different stimuli, including light and heat. When this protein is activated by light or heat, the ion channel will open and allow the entering of ions such as calcium into the plasma membrane. This influx of ions will bind to intracellular ion interacting partners linked to a polypeptide including the hRNA and the other components of the IscB polypeptide nuclease/hRNA molecule complex or system, and the binding will induce the change of sub-cellular localization of the polypeptide, leading to the entire polypeptide entering the nucleus of cells. Once inside the nucleus, the hRNA protein and the other components of the IscB polypeptide nuclease/hRNA molecule complex will be active and modulating target gene expression in cells.

[0180] While light activation may be an advantageous embodiment, sometimes it may be disadvantageous especially for in vivo applications in which the light may not penetrate the skin or other organs. In this instance, other methods of energy activation are contemplated, in particular, electric field energy and/or ultrasound which have a similar effect.

[0181] Electric field energy is preferably administered substantially as described in the art, using one or more electric pulses of from about 1 Volt/cm to about 10 kVolts/cm under in vivo conditions. Instead of or in addition to the pulses, the electric field may be delivered in a continuous manner. The electric pulse may be applied for between 1 μs and 500 milliseconds, preferably between 1 μs and 100 milliseconds. The electric field may be applied continuously or in a pulsed manner for 5 about minutes.

[0182] As used herein, ‘electric field energy’ is the electrical energy to which a cell is exposed. Preferably the electric field has a strength of from about 1 Volt/cm to about 10 kVolts/cm or more under in vivo conditions (see WO97/49450).

[0183] As used herein, the term “electric field” includes one or more pulses at variable capacitance and voltage and including exponential and/or square wave and/or modulated wave and/or modulated square wave forms. References to electric fields and electricity should be taken to include reference the presence of an electric potential difference in the environment of a cell. Such an environment may be set up by way of static electricity, alternating current (AC), direct current (DC), etc., as known in the art. The electric field may be uniform, non-uniform or otherwise, and may vary in strength and/or direction in a time dependent manner.

[0184] Single or multiple applications of electric field, as well as single or multiple applications of ultrasound are also possible, in any order and in any combination. The ultrasound and/or the electric field may be delivered as single or multiple continuous applications, or as pulses (pulsatile delivery).

[0185] Electroporation has been used in both in vitro and in vivo procedures to introduce foreign material into living cells. With in vitro applications, a sample of live cells is first mixed with the agent of interest and placed between electrodes such as parallel plates. Then, the electrodes apply an electrical field to the cell/implant mixture. Examples of systems that perform in vitro electroporation include the Electro Cell Manipulator ECM600 product, and the Electro Square Porator T820, both made by the BTX Division of Genetronics, Inc (see U.S. Pat. No. 5,869,326).

[0186] The known electroporation techniques (both in vitro and in vivo) function by applying a brief high voltage pulse to electrodes positioned around the treatment region. The electric field generated between the electrodes causes the cell membranes to temporarily become porous, whereupon molecules of the agent of interest enter the cells. In known electroporation applications, this electric field comprises a single square wave pulse on the order of 1000 V/cm, of about 100 .mu.s duration. Such a pulse may be generated, for example, in known applications of the Electro Square Porator T820.

[0187] Preferably, the electric field has a strength of from about 1 V/cm to about 10 kV/cm under in vitro conditions. Thus, the electric field may have a strength of 1 V/cm, 2 V/cm, 3 V/cm, 4 V/cm, 5 V/cm, 6 V/cm, 7 V/cm, 8 V/cm, 9 V/cm, 10 V/cm, 20 V/cm, 50 V/cm, 100 V/cm, 200 V/cm, 300 V/cm, 400 V/cm, 500 V/cm, 600 V/cm, 700 V/cm, 800 V/cm, 900 V/cm, 1 kV/cm, 2 kV/cm, 5 kV/cm, 10 kV/cm, 20 kV/cm, 50 kV/cm or more. More preferably from about 0.5 kV/cm to about 4.0 kV/cm under in vitro conditions. Preferably the electric field has a strength of from about 1 V/cm to about 10 kV/cm under in vivo conditions. However, the electric field strengths may be lowered where the number of pulses delivered to the target site are increased. Thus, pulsatile delivery of electric fields at lower field strengths is envisaged.

[0188] Preferably, the application of the electric field is in the form of multiple pulses such as double pulses of the same strength and capacitance or sequential pulses of varying strength and/or capacitance. As used herein, the term “pulse” includes one or more electric pulses at variable capacitance and voltage and including exponential and/or square wave and/or modulated wave/square wave forms.

[0189] Preferably, the electric pulse is delivered as a waveform selected from an exponential wave form, a square wave form, a modulated wave form and a modulated square wave form.

[0190] A preferred embodiment employs direct current at low voltage. Thus, Applicants disclose the use of an electric field which is applied to the cell, tissue, or tissue mass at a field strength of between 1V/cm and 20V/cm, for a period of 100 milliseconds or more, preferably 15 minutes or more.

[0191] Ultrasound is advantageously administered at a power level of from about 0.05 W/cm2 to about 100 W/cm2. Diagnostic or therapeutic ultrasound may be used, or combinations thereof.

[0192] As used herein, the term “ultrasound” refers to a form of energy which consists of mechanical vibrations the frequencies of which are so high they are above the range of human hearing. Lower frequency limit of the ultrasonic spectrum may generally be taken as about 20 kHz. Most diagnostic applications of ultrasound employ frequencies in the range 1 and 15 MHz′ (From Ultrasonics in Clinical Diagnosis, P. N. T. Wells, ed., 2nd. Edition, Publ. Churchill Livingstone [Edinburgh, London & NY, 1977]).

[0193] Ultrasound has been used in both diagnostic and therapeutic applications. When used as a diagnostic tool (“diagnostic ultrasound”), ultrasound is typically used in an energy density range of up to about 100 mW/cm2 (FDA recommendation), although energy densities of up to 750 mW/cm2 have been used. In physiotherapy, ultrasound is typically used as an energy source in a range up to about 3 to 4 W/cm2 (WHO recommendation). In other therapeutic applications, higher intensities of ultrasound may be employed, for example, HIFU at 100 W/cm up to 1 kW/cm2 (or even higher) for short periods of time. The term “ultrasound” as used in this specification is intended to encompass diagnostic, therapeutic, and focused ultrasound.

[0194] Focused ultrasound (FUS) allows thermal energy to be delivered without an invasive probe (see Morocz et al 1998 Journal of Magnetic Resonance Imaging Vol. 8, No. 1, pp. 136-142. Another form of focused ultrasound is high intensity focused ultrasound (HIFU) which is reviewed by Moussatov et al in Ultrasonics (1998) Vol. 36, No. 8, pp. 893-900 and TranHuuHue et al in Acustica (1997) Vol. 83, No. 6, pp. 1103-1106.

[0195] Preferably, a combination of diagnostic ultrasound and a therapeutic ultrasound is employed. This combination is not intended to be limiting, however, and the skilled reader will appreciate that any variety of combinations of ultrasound may be used. Additionally, the energy density, frequency of ultrasound, and period of exposure may be varied.

[0196] Preferably, the exposure to an ultrasound energy source is at a power density of from about 0.05 to about 100 Wcm-2. Even more preferably, the exposure to an ultrasound energy source is at a power density of from about 1 to about 15 Wcm-2.

[0197] Preferably, the exposure to an ultrasound energy source is at a frequency of from about 0.015 to about 10.0 MHz. More preferably the exposure to an ultrasound energy source is at a frequency of from about 0.02 to about 5.0 MHz or about 6.0 MHz. Most preferably, the ultrasound is applied at a frequency of 3 MHz.

[0198] Preferably the exposure is for periods of from about 10 milliseconds to about 60 minutes. Preferably the exposure is for periods of from about 1 second to about 5 minutes. More preferably, the ultrasound is applied for about 2 minutes. Depending on the particular target cell to be disrupted, however, the exposure may be for a longer duration, for example, for 15 minutes.

[0199] Advantageously, the target tissue is exposed to an ultrasound energy source at an acoustic power density of from about 0.05 Wcm-2 to about 10 Wcm-2 with a frequency ranging from about 0.015 to about 10 MHz (see WO 98/52609). However, alternatives are also possible, for example, exposure to an ultrasound energy source at an acoustic power density of above 100 Wcm-2, but for reduced periods of time, for example, 1000 Wcm-2 for periods in the millisecond range or less.

[0200] Preferably, the application of the ultrasound is in the form of multiple pulses; thus, both continuous wave and pulsed wave (pulsatile delivery of ultrasound) may be employed in any combination. For example, continuous wave ultrasound may be applied, followed by pulsed wave ultrasound, or vice versa. This may be repeated any number of times, in any order and combination. The pulsed wave ultrasound may be applied against a background of continuous wave ultrasound, and any number of pulses may be used in any number of groups.

[0201] Preferably, the ultrasound may comprise pulsed wave ultrasound. In a highly preferred embodiment, the ultrasound is applied at a power density of 0.7 Wcm-2 or 1.25 Wcm-2 as a continuous wave. Higher power densities may be employed if pulsed wave ultrasound is used.

[0202] Use of ultrasound is advantageous as, like light, it may be focused accurately on a target. Moreover, ultrasound is advantageous as it may be focused more deeply into tissues unlike light. It is therefore better suited to whole-tissue penetration (such as but not limited to a lobe of the liver) or whole organ (such as but not limited to the entire liver or an entire muscle, such as the heart) therapy. Another important advantage is that ultrasound is a non-invasive stimulus which is used in a wide variety of diagnostic and therapeutic applications. By way of example, ultrasound is well known in medical imaging techniques and, additionally, in orthopedic therapy. Furthermore, instruments suitable for the application of ultrasound to a subject vertebrate are widely available and their use is well known in the art.

[0203] In one embodiment, the hRNA molecule is modified by a secondary structure to increase the specificity of the IscB polypeptide nuclease and related system and the secondary structure can protect against exonuclease activity and allow for 5′ additions to the hRNA sequence also referred to herein as a protected hRNA molecule.

[0204] In one aspect, the invention provides for hybridizing a “protector RNA” to a sequence of the hRNA molecule, wherein the “protector RNA” is an RNA strand complementary to the 3′ end of the hRNA molecule to thereby generate a partially double-stranded hRNA. In an embodiment of the invention, protecting mismatched bases (i.e., the bases of the hRNA molecule which do not form part of the hRNA sequence) with a perfectly complementary protector sequence decreases the likelihood of target DNA binding to the mismatched basepairs at the 3′ end. In one embodiment of the invention, additional sequences comprising an extended length may also be present within the hRNA molecule such that the hRNA comprises a protector sequence within the hRNA molecule. This “protector sequence” ensures that the hRNA molecule comprises a “protected sequence” in addition to an “exposed sequence” (comprising the part of the hRNA sequence hybridizing to the target sequence). In one embodiment, the hRNA molecule is modified by the presence of the protector hRNA to comprise a secondary structure such as a hairpin. Advantageously there are three or four to thirty or more, e.g., about 10 or more, contiguous base pairs having complementarity to the protected sequence, the hRNA sequence or both. It is advantageous that the protected portion does not impede thermodynamics of the IscB polypeptide nuclease and related system interacting with its target. By providing such an extension including a partially double stranded hRNA molecule, the hRNA molecule is considered protected and results in improved specific binding of the IscB polypeptide nuclease/hRNA molecule complex, while maintaining specific activity.

[0205] In one embodiment, use is made of a truncated hRNA (tru-hRNA), i.e., a hRNA molecule which comprises a hRNA sequence which is truncated in length with respect to the canonical hRNA sequence length. As described by Nowak et al. (Nucleic Acids Res (2016) 44 (20): 9555-9564), such guides may allow catalytically active IscB polypeptide nuclease to bind its target without cleaving the target DNA. In one embodiment, a truncated hRNA is used which allows the binding of the target but retains only nickase activity of the IscB polypeptide nuclease.

[0206] In one embodiment, conjugation of triantennary N-acetyl galactosamine (GalNAc) to oligonucleotide components may be used to improve delivery, for example delivery to select cell types, for example hepatocytes (see International Patent Publication No. WO 2014/118272 incorporated herein by reference; Nair, J K et al., 2014, Journal of the American Chemical Society 136 (49), 16958-16961). This is considered to be a sugar-based particle and further details on other particle delivery systems and/or formulations are provided herein. GalNAc can therefore be considered to be a particle in the sense of the other particles described herein, such that general uses and other considerations, for instance delivery of said particles, apply to GalNAc particles as well. A solution-phase conjugation strategy may for example be used to attach triantennary GalNAc clusters (mol. wt. ˜2000) activated as PFP (pentafluorophenyl) esters onto 5′-hexylamino modified oligonucleotides (5′-HA ASOs, mol. wt. ˜8000 Da; Ostergaard et al., Bioconjugate Chem., 2015, 26 (8), pp 1451-1455). Similarly, poly(acrylate) polymers have been described for in vivo nucleic acid delivery (see WO2013158141 incorporated herein by reference). In further alternative embodiments, pre-mixing IscB polypeptide nuclease nanoparticles (or protein complexes) with naturally occurring serum proteins may be used in order to improve delivery (Akinc A et al, 2010, Molecular Therapy vol. 18 no. 7, 1357-1364).

[0207] Screening techniques are available to identify delivery enhancers, for example by screening chemical libraries (Gilleron J. et al., 2015, Nucl. Acids Res. 43 (16): 7984-8001). Approaches have also been described for assessing the efficiency of delivery vehicles, such as lipid nanoparticles, which may be employed to identify effective delivery vehicles for components (see Sahay G. et al., 2013, Nature Biotechnology 31, 653-658).

### Large IscBs (CRISPR-Associated IscB)

[0208] One embodiment of IscB may comprise a bridge helix domain that is split in two by REC-like insertions. The REC-like insertions can be inserted between the RuvC-I and RuvC-II domains. Such IscB polypeptides are referred to herein as large IscB polypeptides and or CRISPR-associated IscB polypeptides which contain a hybrid CRISPR omega RNA that consists of a CRISPR array preceding a partial ωRNA. Such large IscB polypeptides can generate insertions/deletions (indels) in the eukaryotic genome (See, e.g., FIGS. 31A, 39A,G, 40A-C and Table 11.

### IsrBs

[0209] As noted above IsrBs are homologs of IscB polypeptides. IsrB polypeptides comprise the PLMP and RuvC domains but do not comprise a HNH domain. IsrB polypeptides may be from about 200 to about 500 amino acids in length, from about 250 to about 450 amino acids in length, from about 300 to about 400 amino acids in length. In one embodiment, the IsrB polypeptide comprises a PLMP domain and a split RuvC but lacks the HNH domain present between the RuvC-II and III subdomains in IscB polypeptides. In one embodiment, the IsrB is an ωRNA guided nickase. In one embodiment, the ωRNA guided IsrB nicks a DNA target. In one embodiment, the DNA target is a dsDNA and the nicks occurs on the non-target strange of the dsDNA target. In one embodiment, the IsrB nicks the dsDNA in a guide and TAM specific manner. Accordingly, applications where a nickase is utilized can be used with the IsrB polypeptides detailed herein in a manner functionally similar to an IscB that has been inactivated at the HNH domain.

### IshB

[0210] As noted above IshBs are IscB homologs and may be referred to herein as an Insertion sequence HNH-like OrfB (IshB) polypeptide. IshB polypeptides are generally smaller than IsrB or IscB polypeptides and contain only the PLMP and HNH domain, but no RuVC domain. The IshB polypeptide may be about 150 to about 235 amino acids in length, about 160 to about 220 amino acids in length, about 170 to about 200 amino acids in length, about 170 to about 190 amino acids in length, or about 175 to 185 amino acids in length. In one embodiment, the IshB, or IscB homolog, comprises a PLMP domain and an HNH domain, but does not comprise a RuvC domain.

[0211] Some IshB polypeptides may be part of the IS605 OrfB family of transposases. In an embodiment, the IshB polypeptide is from Actinoplanes lobatus and has the Genbank accession number MBB4752409. In an embodiment, the RefSeq database accession number for the polypeptide with accession number MBB4752409 is WP_188124268 and the INSDC number is GGN95087.In an embodiment the protein sequence is 383 amino acids in length. In an embodiment the amino acid sequence corresponding to accession number MBB4752409 is in the table below.

| Accession | |
|---|---|
| Number | Sequence (aa) |
| MBB4752409 | MKLVVQVKLQ PTAEQASMLE ATLRACNTAA |
| | NEVAQVARRA RVYRNYDLRK |
| | HVYAGIKADHRLGSQAAQHV IKKVCDAYKT |
| | LTSNLRAGNY GPPDAKRYRR VSTEPVRFRW |
| | QAAQPYDARMLSWQHDARTV SIWTVAGRMK |
| | NIAYTGSPDQ LKAVAELPVG ECDL VHRDGM |
| | WLLYATVEIAEATPVEPAGF |
| | LGVDLGIVQI ATDSDGTVYA |
| | GEQLNR YRRR QIRLRAKLQA |
| | KKTESARRLLVKRARRESRH |
| | ATNVNHVISK SIVAEAERTS |
| | RGIAVEDLTG IRARVRLRKP |
| | QRAALHSWSFAQLGGFLTYK |
| | ARRAGIPLVQ VDPRYTSQTC |
| | SACGHRDKRN RPDQATFICR |
| | SCGVVAHADVNAAVNIAARG |
| | VDVWGAVSRPYVA |
| | (SEQ ID NO: 3) |

### Specialty IscB Systems

[0212] In one embodiment, the system is a IscB-based system that is capable of performing a specialized function or activity. For example, the IscB protein may be fused, operably coupled to, or otherwise associated with one or more functionals domains. In certain example embodiments, the IscB protein may be a catalytically dead IscB protein and/or have nickase activity. A nickase is an IscB protein that cuts only one strand of a double stranded target. In such embodiments, the catalytically inactive IscB or nickase provide a sequence specific targeting functionality via the hRNA that delivers the functional domain to or proximate a target sequence. In an embodiment, the catalytically inactive Cas IscB or nickase provide a sequence specific targeting functionality via the guide RNA that delivers the functional domain to or proximate a target sequence. Example functional domains that may be fused to, operably coupled to, or otherwise associated with an IscB protein can be or include, but are not limited to a nuclear localization signal (NLS) domain, a nuclear export signal (NES) domain, a translational activation domain, a transcriptional activation domain (e.g. VP64, p65, MyoD1, HSF1, RTA, and SET7/9), a translation initiation domain, a transcriptional repression domain (e.g., a KRAB domain, NuE domain, NcoR domain, and a SID domain such as a SID4X domain), a nuclease domain (e.g., FokI), a histone modification domain (e.g., a histone acetyltransferase), a light inducible/controllable domain, a chemically inducible/controllable domain, a transposase domain, a homologous recombination machinery domain, a recombinase domain, an integrase domain, and combinations thereof. Methods for generating catalytically dead IscB or a nickase IscB can be adapted from approaches in Cas9 proteins, see, for example, WO 2014/204725, Ran et al. Cell. 2013 Sep. 12; 154(6):1380-1389, known in the art and incorporated herein by reference. Briefly, one or more mutations in the catalytic domain of the RuvC domain and/or the HNH domain of the IscB protein can be introduced that may reduce or abolish NHEJ activity. In an aspect, at least one mutation in the RuvC domain and at least one mutation in the HNH domain is provided.

[0213] In one embodiment, the functional domains can have one or more of the following activities: methylase activity, demethylase activity, translation activation activity, translation initiation activity, translation repression activity, transcription activation activity, transcription repression activity, transcription release factor activity, histone modification activity, nuclease activity (e.g. VirD2), single-strand RNA cleavage activity, double-strand RNA cleavage activity, single-strand DNA cleavage activity, double-strand DNA cleavage activity, molecular switch activity, chemical inducibility, light inducibility, and nucleic acid binding activity. In one embodiment, the one or more functional domains may comprise epitope tags or reporters. Non-limiting examples of epitope tags include histidine (His) tags, V5 tags, FLAG tags, influenza hemagglutinin (HA) tags, Myc tags, VSV-G tags, and thioredoxin (Trx) tags. Examples of reporters include, but are not limited to, glutathione-S-transferase (GST), horseradish peroxidase (HRP), chloramphenicol acetyltransferase (CAT) beta-galactosidase, beta-glucuronidase, luciferase, green fluorescent protein (GFP), HcRed, DsRed, cyan fluorescent protein (CFP), yellow fluorescent protein (YFP), and auto-fluorescent proteins including blue fluorescent protein (BFP).

[0214] The one or more functional domain(s) may be positioned at, near, and/or in proximity to a terminus of the effector protein (e.g., a IscB protein). In embodiments having two or more functional domains, each of the two can be positioned at or near or in proximity to a terminus of the effector protein (e.g., a IscB protein). In one embodiment, such as those where the functional domain is operably coupled to the effector protein, the one or more functional domains can be tethered or linked via a suitable linker (including, but not limited to, GlySer linkers) to the effector protein (e.g., a IscB protein). When there is more than one functional domain, the functional domains can be same or different. In one embodiment, all the functional domains are the same. In one embodiment, all of the functional domains are different from each other. In one embodiment, at least two of the functional domains are different from each other. In one embodiment, at least two of the functional domains are the same as each other.

[0215] Other suitable functional domains can be found, for example, in International Application Publication No. WO 2019/018423, for example, at [0678]-[0692], incorporated herein by reference.

### Functional Domains Modifications

[0216] The IscB polypeptide (including variants such as a catalytically inactive form) may be associated with one or more functional domains (e.g., via fusion protein or suitable linkers). In an embodiment, the IscB polypeptide nuclease, or an ortholog or homolog thereof, may be used as a generic nucleic acid binding protein with fusion to or being operably linked to one or more functional domains. In one example, the functional domain is a deaminase. In another example, the functional domain is a transposase. In another example, the functional domain is a reverse transcriptase. In some cases, a functional domain may be associate with (e.g., fuse to) the IscB polypeptide nuclease. In some cases, a functional domain may be a protein different from the IscB polypeptide nuclease. In such cases, a functional domain and the IscB polypeptide nuclease may form a protein complex.

[0217] It is also envisaged that the IscB polypeptide nuclease-hRNA molecule complex or Cas IscB polypeptide nuclease-guide RNA molecule complex as a whole may be associated with two or more functional domains. For example, there may be two or more functional domains associated with the IscB polypeptide nuclease, or there may be two or more functional domains associated with the hRNA (via one or more adaptor proteins), or there may be one or more functional domains associated with the RNA-targeting effector protein and one or more functional domains associated with the hRNA (via one or more adaptor proteins) or one or more functional domains associated with the guide RNA molecule (via one or more adaptor proteins).

[0218] In one embodiment, the IscB polypeptide nuclease is associated with one or more functional domains. The association can be by direct linkage of the effector protein to the functional domain, or by association with the crRNA. In a non-limiting example, the crRNA comprises an added or inserted sequence that can be associated with a functional domain of interest, including, for example, an aptamer or a nucleotide that binds to a nucleic acid binding adapter protein. The functional domain may be a functional heterologous domain.

[0219] In one embodiment, the invention also provides for the one or more heterologous functional domains to have one or more of the following activities: methylase activity, demethylase activity, transcription activation activity, transcription repression activity, transcription release factor activity, histone modification activity, nuclease activity, single-strand RNA cleavage activity, double-strand RNA cleavage activity, single-strand DNA cleavage activity, double-strand DNA cleavage activity and nucleic acid binding activity. At least one or more heterologous functional domains may be at or near the amino-terminus of the effector protein and/or wherein at least one or more heterologous functional domains is at or near the carboxy-terminus of the effector protein. The one or more heterologous functional domains may be fused to the effector protein. The one or more heterologous functional domains may be tethered to the effector protein. The one or more heterologous functional domains may be linked to the effector protein by a linker moiety.

[0220] In an embodiment, the IscB polypeptide nuclease or an ortholog or homolog thereof, may be used as a generic nucleic acid binding protein with fusion to or being operably linked to a functional domain. Exemplary functional domains may include but are not limited to translational initiator, translational activator, translational repressor, nucleases, in particular ribonucleases, a spliceosome, beads, a light inducible/controllable domain or a chemically inducible/controllable domain. In an embodiment, the one or more functional domains are controllable, e.g., inducible.

[0221] In one embodiment, one or more functional domains are associated with a IscB polypeptide nuclease via an adaptor protein, for example as used with the modified guides of Konnerman et al. (Nature 517, 583-588, 29 Jan. 2015).

[0222] In one embodiment, the one or more functional domains is attached to the adaptor protein so that upon binding of the IscB polypeptide nuclease to the hRNA molecule and target, the functional domain is in a spatial orientation allowing for the functional domain to function in its attributed function.

[0223] In one embodiment, the one or more functional domains is attached to the adaptor protein so that upon binding of the Cas IscB polypeptide nuclease to the guide RNA molecule and target, the functional domain is in a spatial orientation allowing for the functional domain to function in its attributed function.

[0224] In one embodiment, one or more functional domains are associated with a dead hRNA molecule. In one embodiment, a hRNA complex with active IscB polypeptide nuclease directs gene regulation by a functional domain at on gene locus while an hRNA directs DNA cleavage by the active IscB polypeptide nuclease at another locus, for example as described analogously in CRISPR-Cas systems by Dahlman et al., ‘Orthogonal gene control with a catalytically active Cas9 nuclease’. In one embodiment, hRNAs are selected to maximize selectivity of regulation for a gene locus of interest compared to off-target regulation. In one embodiment, hRNAs are selected to maximize target gene regulation and minimize target cleavage.

[0225] In one embodiment, one or more functional domains are associated with a dead guide RNA molecule. In one embodiment, a guide RNA complex with active Cas IscB polypeptide nuclease directs gene regulation by a functional domain at one gene locus while an hRNA directs DNA cleavage by the active IscB polypeptide nuclease at another locus, for example as described analogously in CRISPR-Cas systems by Dahlman et al., ‘Orthogonal gene control with a catalytically active Cas9 nuclease’. In one embodiment, hRNAs are selected to maximize selectivity of regulation for a gene locus of interest compared to off-target regulation. In one embodiment, hRNAs are selected to maximize target gene regulation and minimize target cleavage

[0226] For the purposes of the following discussion, reference to a functional domain could be a functional domain associated with the IscB polypeptide nuclease or a functional domain associated with the adaptor protein. In one embodiment, the one or more functional domains is attached to the adaptor protein so that upon binding of the IscB polypeptide nuclease to the hRNA molecule and target, the functional domain is in a spatial orientation allowing for the functional domain to function in its attributed function.

[0227] In the practice of the invention, loops of the hRNA may be extended, without colliding with the IscB polypeptide nuclease by the insertion of distinct RNA loop(s) or distinct sequence(s) that may recruit adaptor proteins that can bind to the distinct RNA loop(s) or distinct sequence(s). The adaptor proteins may include but are not limited to orthogonal RNA-binding protein/aptamer combinations that exist within the diversity of bacteriophage coat proteins. A list of such coat proteins includes, but is not limited to: Qβ, F2, GA, fr, JP501, M12, R17, BZ13, JP34, JP500, KU1, M11, MX1, TW18, VK, SP, FI, ID2, NL95, TW19, AP205, ϕCb5, ϕCb8r, ϕCb12r, ϕCb23r, 7s and PRR1. These adaptor proteins or orthogonal RNA binding proteins can further recruit effector proteins or fusions which comprise one or more functional domains.

[0228] Examples of functional domains include deaminase domain, transposase domain (e.g. helitron), reverse transcriptase domain, integrase domain, recombinase domain, resolvase domain, invertase domain, protease domain, DNA methyltransferase domain, DNA hydroxylmethylase domain, RNA polymerase domains, DNA demethylase domain, histone acetylase domain, histone deacetylases domain, nuclease domain (e.g. VirD2 domain), repressor domain, activator domain, nuclear-localization signal domains, transcription-regulatory protein (or transcription complex recruiting) domain, cellular uptake activity associated domain, nucleic acid binding domain, antibody presentation domain, histone modifying enzymes, recruiter of histone modifying enzymes; inhibitor of histone modifying enzymes, histone methyltransferase, histone demethylase, histone kinase, histone phosphatase, histone ribosylase, histone deribosylase, histone ubiquitinase, histone deubiquitinase, histone biotinase and histone tail protease. In some preferred embodiments, the functional domain is a transcriptional activation domain, such as, without limitation, VP64, p65, MyoD1, HSF1, RTA, SET7/9 or a histone acetyltransferase. In one embodiment, the functional domain is a transcription repression domain, preferably KRAB. In one embodiment, the transcription repression domain is SID, or concatemers of SID (e.g. SID4X). In one embodiment, the functional domain is an epigenetic modifying domain, such that an epigenetic modifying enzyme is provided. In one embodiment, the functional domain is an activation domain, which may be the P65 activation domain.

[0229] In some examples, the IscB polypeptide nuclease is associated with a ligase or functional fragment thereof. The ligase may ligate a single-strand break (a nick) generated by the IscB polypeptide nuclease. In certain cases, the ligase may ligate a double-strand break generated by the IscB polypeptide nuclease. In certain examples, the IscB polypeptide nuclease is associated with a reverse transcriptase or functional fragment thereof.

[0230] In one embodiment, the one or more functional domains is a transcriptional repressor domain. In one embodiment, the transcriptional repressor domain is a KRAB domain. In one embodiment, the transcriptional repressor domain is a NuE domain, NcoR domain, SID domain or a SID4X domain.

[0231] In one embodiment, the one or more functional domains have one or more activities, e.g., one or more of transposase activity, methylase activity, demethylase activity, translation activation activity, translation repression activity, transcription activation activity, transcription repression activity, transcription release factor activity, chromatin modifying or remodeling activity, histone modification activity, nuclease activity, single-strand RNA cleavage activity, double-strand RNA cleavage activity, single-strand DNA cleavage activity, double-strand DNA cleavage activity, nucleic acid binding activity, and detectable activity.

[0232] Histone modifying domains are also preferred In one embodiment. Exemplary histone modifying domains are discussed below. Transposase domains, HR (Homologous Recombination) machinery domains, recombinase domains, and/or integrase domains are also preferred as the present functional domains. In one embodiment, DNA integration activity includes HR machinery domains, integrase domains, recombinase domains and/or transposase domains.

[0233] In one embodiment, the DNA cleavage activity is due to a nuclease. In one embodiment, the nuclease comprises a Fok1 nuclease. See, “Dimeric CRISPR RNA-guided FokI nucleases for highly specific genome editing”, Shengdar Q. Tsai, Nicolas Wyvekens, Cyd Khayter, Jennifer A. Foden, Vishal Thapar, Deepak Reyon, Mathew J. Goodwin, Martin J. Aryee, J. Keith Joung Nature Biotechnology 32(6): 569-77 (2014), relates to dimeric RNA-guided FokI Nucleases that recognize extended sequences and can edit endogenous genes with high efficiencies in human cells.

[0234] In one embodiment, the one or more functional domains is attached to the IscB polypeptide nuclease so that upon binding to the sgRNA and target the functional domain is in a spatial orientation allowing for the functional domain to function in its attributed function.

[0235] In one embodiment, the IscB polypeptide nuclease comprise one or more heterologous functional domains. As used herein, a heterologous functional domain is a polypeptide that is not derived from the same species as the IscB polypeptide nuclease. For example, a heterologous functional domain of a IscB polypeptide nuclease derived from species A is a polypeptide derived from a species different from species A, or an artificial polypeptide. The one or more heterologous functional domains may comprise one or more nuclear localization signal (NLS) domains. The one or more heterologous functional domains may comprise at least two or more NLSs. The one or more heterologous functional domains may comprise one or more transcriptional activation domains. A transcriptional activation domain may comprise VP64. The one or more heterologous functional domains may comprise one or more transcriptional repression domains. A transcriptional repression domain may comprise a KRAB domain or a SID domain. The one or more heterologous functional domain may comprise one or more nuclease domains. The one or more nuclease domains may comprise Fok1.

[0236] Functional domains may be used to regulate transcription, e.g., transcriptional repression. Transcriptional repression is often mediated by chromatin modifying enzymes such as histone methyltransferases (HMTs) and deacetylases (HDACs). Repressive histone effector domains are known and an exemplary list is provided below. In the exemplary table, preference was given to proteins and functional truncations of small size to facilitate efficient viral packaging (for instance via AAV). In general, however, the domains may include HDACs, histone methyltransferases (HMTs), and histone acetyltransferase (HAT) inhibitors, as well as HDAC and HMT recruiting proteins. The functional domain may be or include, In one embodiment, HDAC Effector Domains, HDAC Recruiter Effector Domains, Histone Methyltransferase (HMT) Effector Domains, Histone Methyltransferase (HMT) Recruiter Effector Domains, or Histone Acetyltransferase Inhibitor Effector Domains.

[0237] In one embodiment, the functional domain may be a Methyltransferase (HMT) Effector Domain. Preferred examples include NUE, vSET, EHMT2/G9A, SUV39H1, dim-5, KYP, SUVR4, SET4, SET1, SETD8, and TgSET8. NUE is exemplified in the present Examples and, although preferred, it is envisaged that others in the class will also be useful.

[0238] In one embodiment, the functional domain may be a Histone Methyltransferase (HMT) Recruiter Effector Domain. Preferred examples include Hp1a, PHF19, and NIPP1.

[0239] In one embodiment, the functional domain may be Histone Acetyltransferase Inhibitor Effector Domain. Preferred examples include SET/TAF-1β.

[0240] In some cases, the target endogenous (regulatory) control elements (such as enhancers and silencers) in addition to a promoter or promoter-proximal elements. Thus, the invention can also be used to target endogenous control elements (including enhancers and silencers) in addition to targeting of the promoter. These control elements can be located upstream and downstream of the transcriptional start site (TSS), starting from 200 bp from the TSS to 100 kb away. Targeting of known control elements can be used to activate or repress the gene of interest. In some cases, a single control element can influence the transcription of multiple target genes. Targeting of a single control element could therefore be used to control the transcription of multiple genes simultaneously.

[0241] Targeting of putative control elements on the other hand (e.g. by tiling the region of the putative control element as well as 200 bp up to 100 kB around the element) can be used as a means to verify such elements (by measuring the transcription of the gene of interest) or to detect novel control elements (e.g. by tiling 100 kb upstream and downstream of the TSS of the gene of interest). In addition, targeting of putative control elements can be useful in the context of understanding genetic causes of disease. Many mutations and common SNP variants associated with disease phenotypes are located outside coding regions. Targeting of such regions with either the activation or repression systems described herein can be followed by readout of transcription of either a) a set of putative targets (e.g. a set of genes located in closest proximity to the control element) or b) whole-transcriptome readout by e.g. RNAseq or microarray. This would allow for the identification of likely candidate genes involved in the disease phenotype. Such candidate genes could be useful as novel drug targets.

[0242] In one embodiment is for the one or more functional domains to comprise an acetyltransferase, preferably a histone acetyltransferase. These are useful in the field of epigenomics, for example in methods of interrogating the epigenome. Methods of interrogating the epigenome may include, for example, targeting epigenomic sequences. Targeting epigenomic sequences may include the hRNA being directed to an epigenomic target sequence. Epigenomic target sequence may include, In one embodiment, include a promoter, silencer or an enhancer sequence.

[0243] The functional domains may be acetyltransferases domains. Examples of acetyltransferases are known but may include, In one embodiment, histone acetyltransferases. In one embodiment, the histone acetyltransferase may comprise the catalytic core of the human acetyltransferase p300 (Gerbasch & Reddy, Nature Biotech 6 Apr. 2015).

### Example IscB Systems

[0244] Example IscB polypeptide and ωRNAs that may be used in the composition embodiments disclosed herein are set forth in Table 1.

Lengthy table referenced here
US20230392131A1-20231207-T00001
Please refer to the end of the specification for access instructions.

### Nucleic Acid-Guided Nucleases

[0245] In one aspect, the present disclosure provides nucleic acid-guided nucleases. In an embodiment, the nucleic acid-guided nuclease is a CRISPR-associated IscB nucleic acid-guided nuclease. The nuclease may form a complex with one or more guide molecules. The complex may bind and target (e.g., cleaving, nicking, or otherwise modify) a target sequence of a target polynucleotide. The nucleic acid-guided nucleases may generate a double-strand and/or single-strand break on a target polynucleotide. A target sequence may be a portion of, equal to, or overspanning a target polynucleotide.

[0246] In some examples, the target polynucleotide is DNA. In some example, the target polynucleotide is RNA. In some examples, the target polynucleotide is DNA-RNA hybrids or derivatives thereof. In an embodiment, the nucleic acid-guided nucleases and related compositions may specifically target double-strand DNA. In an embodiment, the nucleic acid-guided nucleases or nuclease/guide complexes may bind and cleave double-strand DNA. In an embodiment, the nucleic acid-guided nucleases or nuclease/guide complexes may bind to double-strand DNA without introducing a break to either or the strands. In an embodiment, the nucleic acid-guided nucleases or nuclease/guide complexes may open, disrupting the continuity of one of the two DNA strands, hereby introducing a nick of the double stranded DNA.

[0247] In one embodiment, the nucleic acid-guided nucleases (e.g., IscB) are CRISPR-associated proteins, e.g., the loci of the nucleases are associated with an CRISPR array. In one embodiment the IscBs may be referred to as Cas IscBs.

[0248] In one embodiment, the nucleic acid-guided nucleases, e.g. Cas IscBs, may have a small size. For example, the nucleic acid-guided nucleases may be no more than 50, no more than 100, no more than 150, no more than 200, no more than 250, no more than 300, no more than 350, no more than 400, no more than 450, no more than 500, no more than 550, no more than 600, no more than 650, no more than 700, no more than 750, no more than 800, no more than 850, no more than 900, no more than 950, or no more than 1000 amino acids in length.

[0249] The Cas IscB nucleic acid-guided nuclease may comprise one or more domains, e.g., one or more of a PLMP domain (e.g., at N-terminus), a RuvC domain, a Bridge Helix domain, and a Y domain (e.g., at C-terminus).

TABLE 2
Examples of nucleic acid-guided nucleases include Sequence Nos. 1-7 below.

| No. | Proteins | Sequences |
|---|---|---|
| 1 | IscB(−HNH) | 1 mstdatlirt tpshaeadat dtlvatplmp prrvispwpg pgegqslmri pvvdirgmal |
| SEQ ID | EFH81386 | 61 mpctpakarh llksgnarpk rnklglfyvq lsyeqepdnq slvagvdpgs kfeglsvvgt |
| NO: | | 121 kdtvlnlmve apdhvkgavq trrtmrrarr qrkwrrpkrf hnrlnrmqri ppstrsrwea |
| 2041 | | 181 karivahlrt ilpftdvvve dvqavtrkgk ggtwngsfsp vqvgkehlyr llramgltlh |
| | | 241 lregwqtkel reqhglkktk skskqsfesh avdswvlaas isgaehptct rlwymvpail |
| | | 301 hrrqlhrlqa skggvrkpyg gtrslgvkrg tlvehkkygr ctvggvdrkr ntislheyrt |
| | | 361 ntrltqaakv etcrvltwls wrswllrgkr tsskgkgshs s |
| 2 | IscB(+HNH) | 1 mqpakqqnwv fqingdkqpl dminpgrcre lqnrgklasf rrfpyvviqq qtienpqtke |
| SEQ ID | TAE54104.1 | 61 yilkidpgsq wtgfaiqcgn dilfraelnh rgeaikfdlv krawfrrgrr srnlryrkkr |
| NO: | | 121 Inrakpegwl apsirhrvlt vetwikrfmr ycpiawieie qvrfdtqkla npeidgveyq |
| 2042 | | 181 qgelqgyevr eyllqkwgrk caycgtenvp levehiqsks kggssrignl tlachvcnvk |
| | | 241 kgnldvrdfl akspdilnqv lenstkplkd aaavnstrya ivkmaksice nvkcssgart |
| | | 301 kmnrvrqgle kthsldaacv gesgasirvl tdrpllitck ghgsrqsirv nasgfpavkn |
| | | 361 aktvfthiaa gdvvrftigk drkkaqagty tarvktptpk gfevlidgar islstmsnvv |
| | | 421 fvhrsdgygy el |
| 3 | IscB(+HNH) | 1 mavfvidkhk rplmpcsekr arlllergra vvhrqvpfvi rlkdrtvqhs avqplrvald |
| SEQ ID | WP_038093640.1 | 61 pgsratgmal vrekntvdtg tgevyreria Inlfelvhrg hrireqldqr rnfrrrrrga |
| NO: | | 121 nlryraprfd nrrrppgwla pslqhrvdtt mawvrrlerw apasaigiet vrfdtqrlqn |
| 2043 | | 181 peisgveyqq galagcevre yllekwgrkc aycgaenvpl eiehivpksr ggsdrvsnla |
| | | 241 lacracnqak gnrdvrafla dqperlaril aqakaplkda aavnatrwal yralvdtglp |
| | | 301 veagtggrtk wnrtrlglpk thaldalcvg qvdqvrhwrv pvlgircagr gsyrrtrltr |
| | | 361 hgfprgyltr nksafgfqtg dliravvtkg kkagtylgri airasgsfni qtpmgvvqgi |
| | | 421 hhrfctllqr adgygyfvqp kpteaalssp rlkagvssag n |
| 4 | IscB(+HNH) | 1 mttnvvfvid tnqkplqpcs aavarklllr gkaamfrryp aviilkkevd svgkpkielr |
| SEQ ID | WP_052490348.1 | 61 idpgskytgf alvdskdnad fiiwgteleh rgaaickelt krsairrsrr nrktryrkkr |
| NO: | | 121 ferrkpegwl apslqhrvdt tltwvkrick fvpimsisve qvkfdlqkle nsdiqgieyq |
| 2044 | | 181 qgtlagytlr eallehwgrk caycdvenvf leiehiypks kggsdkfsnl tlachkenin |
| | | 241 kgnksidefl lsdhkrleqi klhqkktlkd aaavnatrkk lvttlqektf Invlvsdgas |
| | | 301 tkmtrlsssl akrhwidagc vnttlivilk tlqplqvken ghgnkqfvtm daygfprksy |
| | | 361 epkkvrkdwk agdiirvtkk dgtmlmgrvk kaakklvyip fggkeasfss enakaihrsd |
| | | 421 gyrysfaaid sellqkmat |
| 5 | IscB(+HNH) | 1 mpnkyafvld skgklldptk skkawylirk gkaslveeyp liiklkrevp kdqvnsdkli |
| SEQ ID | WP_015325818.1 | 61 lgiddgtkkv gfalvqkcqt knkvlfkavm eqrqdvskkm eerrgyrryr rshkryrpar |
| NO: | | 121 fdnrssskrk grippsilqk kqailrvvnk lkkyiridki vledvsidir kltegrelyn |
| 2045 | | 181 weyqesnrld enlrkatlyr ddctcqlegt tetmlhahhi mprrdggads iynlitlcka |
| | | 241 chkdkvdnne yqykdqflai idskelsdlk sashvmqgkt wlrdklskia qleitsggnt |
| | | 301 ankridyeie kshsndaict tgllpvdnid dikeyyikpl rkkskakike lkcfrqrdlv |
| | | 361 kytkrngety tgyitslrik nnkynskven fstlkgkifr gygfrnltll nrpkglmiv |
| 6 | sp\|G3ECR1\|C | 1 mlfnkciiis inldfsnkek cmtkpysigl digtnsvgwa vitdnykvps kkmkvlgnts |
| SEQ ID | AS9_STRTR | 61 kkyikknllg vllfdsgita egrrlkrtar rrytrrrnri lylqeifste matlddaffq |
| NO: | | 121 rlddsflvpd dkrdskypif gnlveekvyh defptiyhlr kyladstkka dlrlvylala |
| 2046 | | 181 hmikyrghfl iegefnsknn diqknfqdfl dtynaifesd lslenskqle eivkdkiskl |
| | | 241 ekkdrilklf pgeknsgifs eflklivgnq adfrkcfnld ekaslhfske sydedletll |
| | | 301 gyigddysdv flkakklyda illsgfltvt dneteaplss amikrynehk edlallkeyi |
| | | 361 rnislktyne vfkddtkngy agyidgktnq edfyvylknl laefegadyf lekidredfl |
| | | 421 rkqrtfdngs ipyqihlqem raildkqakf ypflaknker iekiltfrip yyvgplargn |
| | | 481 sdfawsirkr nekitpwnfe dvidkessae afinrmtsfd lylpeekvlp khsllyetfn |
| | | 541 vyneltkvrf iaesmrdyqf ldskqkkdiv rlyfkdkrkv tdkdiieylh aiygydgiel |
| | | 601 kgiekqfnss Istyhdllni indkefldds sneaiieeii htltifedre mikqrlskfe |
| | | 661 nifdksvlkk lsrrhytgwg klsaklingi rdeksgntil dyliddgisn rnfmqlihdd |
| | | 721 alsfkkkiqk aqiigdedkg nikevvkslp gspaikkgil qsikivdelv kvmggrkpes |
| | | 781 ivvemarenq ytnqgksnsq qrlkrleksl kelgskilke nipaklskid nnalqndrly |
| | | 841 lyylqngkdm ytgddldidr lsnydidhii pqaflkdnsi dnkvlvssas nrgksddfps |
| | | 901 levvkkrktf wyqllkskli sqrkfdnltk aerggllped kagfiqrqlv etrqitkhva |
| | | 961 rlldekfnnk kdennravrt vkiitlkstl vsqfrkdfel ykvreindfh hahdaylnav |
| | | 1021 iasallkkyp klepefvygd ypkynsfrer ksatekvyfy snimnifkks isladgrvie |
| | | 1081 rplievneet gesvwnkesd latvrrvlsy pqvnvvkkve eqnhgldrgk pkglfnanls |
| | | 1141 skpkpnsnen lvgakeyldp kkyggyagis nsfavlvkgt iekgakkkit nvlefqgisi |
| | | 1201 ldrinyrkdk Infllekgyk dieliielpk yslfelsdgs rrmlasilst nnkrgeihkg |
| | | 1261 nqiflsqkfv kllyhakris ntinenhrky venhkkefee lfyyilefne nyvgakkngk |
| | | 1321 llnsafqswq nhsidelcss figptgserk glfeltsrgs aadfeflgvk ipryrdytps |
| | | 1381 sllkdatlih qsvtglyetr idlaklgeg |
| 7 | sp\|J7RUA5\|C | 1 mkrnyilgld igitsvgygi idyetrdvid agvrlfkean vennegrrsk rgarrlkrrr |
| SEQ ID | AS9_STAAU | 61 rhriqrvkkl lfdynlltdh selsginpye arvkglsqkl seeefsaall hlakrrgvhn |
| NO: | | 121 vneveedtgn elstkeqisr nskaleekyv aelqlerlkk dgevrgsinr fktsdyvkea |
| 2047 | | 181 kqllkvqkay hqldqsfidt yidlletrrt yyegpgegsp fgwkdikewy emlmghctyf |
| | | 241 peelrsvkya ynadlynaln dlnnlvitrd enekleyyek fqiienvfkq kkkptlkqia |
| | | 301 keilvneedi kgyrvtstgk peftnlkvyh dikditarke iienaelldq iakiltiyqs |
| | | 361 sediqeeltn Inseltqeei eqisnlkgyt gthnlslkai nlildelwht ndnqiaifnr |
| | | 421 lklvpkkvdl sqgkeipttl vddfilspvv krsfiqsikv inaiikkygl pndiiielar |
| | | 481 eknskdaqkm inemqkrnrq tnerieeiir ttgkenakyl iekiklhdmq egkclyslea |
| | | 541 ipledllnnp fnyevdhiip rsvsfdnsfn nkvlvkqeen skkgnrtpfq ylsssdskis |
| | | 601 yetfkkhiln lakgkgrisk tkkeylleer dinrfsvqkd finrnlvdtr yatrglmnll |
| | | 661 rsyfrvnnld vkvksinggf tsflrrkwkf kkernkgykh haedaliian adfifkewkk |
| | | 721 ldkakkvmen qmfeekqaes mpeieteqey keifitphqi khikdfkdyk yshrvdkkpn |
| | | 781 relindtlys trkddkgntl ivnninglyd kdndklkkli nkspekllmy hhdpqtyqkl |
| | | 841 klimeqygde knplykyyee tgnyltkysk kdngpvikki kyygnklnah lditddypns |
| | | 901 rnkvvklslk pyrfdvyldn gvykfvtvkn ldvikkenyy evnskcyeea kklkkisnqa |
| | | 961 efiasfynnd likingelyr vigvnndlln rievnmidit yreylenmnd krppriikti |
| | | 1021 asktqsikky stdilgnlye vkskkhpqii kkg |
| 8 | Streptococcus_ | 1 kysigldigt nsvgwavitd eykvpskkfk vlgntdrhsi kknligallf dsgetaeatr |
| SEQ ID | pyogenes_ | 61 lkrtarrryt rrknricylq eifsnemakv ddsffhrlee sflveedkkh erhpifgniv |
| NO: | SF370 | 121 devayhekyp tiyhlrkklv dstdkadlrl iylalahmik frghfliegd Inpdnsdvdk |
| 2048 | | 181 lfiqlvqtyn qlfeenpina sgvdakails arlsksrrle nliaqlpgek knglfgnlia |
| | | 241 lslgltpnfk snfdlaedak lqlskdtydd dldnllaqig dqyadlflaa knlsdaills |
| | | 301 dilrvnteit kaplsasmik rydehhqdlt llkalvrqql pekykeiffd qskngyagyi |
| | | 361 dggasqeefy kfikpilekm dgteellvkl nredllrkqr tfdngsiphq ihlgelhail |
| | | 421 rrqedfypfl kdnrekieki ltfripyyvg plargnsrfa wmtrkseeti tpwnfeevvd |
| | | 481 kgasaqsfie rmtnfdknlp nekvlpkhsl lyeyftvyne ltkvkyvteg mrkpaflsge |
| | | 541 qkkaivdllf ktnrkvtvkq lkedyfkkie cfdsveisgv edrfnaslgt yhdllkiikd |
| | | 601 kdfldneene diledivltl tlfedremie erlktyahlf ddkvmkqlkr rrytgwgrls |
| | | 661 rklingirdk qsgktildfl ksdgfanrnf mqlihddslt fkediqkaqv sgqgdslheh |
| | | 721 ianlagspai kkgilqtvkv vdelvkvmgr hkpeniviem arenqttqkg qknsrermkr |
| | | 781 ieegikelgs qilkehpven tqlqneklyl yylqngrdmy vdqeldinrl sdydvdhivp |
| | | 841 qsflkddsid nkvltrsdkn rgksdnvpse evvkkmknyw rqllnaklit qrkfdnltka |
| | | 901 ergglseldk agfikrqlve trqitkhvaq ildsrmntky dendklirev kvitlksklv |
| | | 961 sdfrkdfqfy kvreinnyhh ahdaylnavv gtalikkypk lesefvygdy kvydvrkmia |
| | | 1021 kseqeigkat akyffysnim nffkteitla ngeirkrpli etngetgeiv wdkgrdfatv |
| | | 1081 rkvlsmpqvn ivkktevqtg gfskesilpk rnsdkliark kdwdpkkygg fdsptvaysv |
| | | 1141 lvvakvekgk skklksvkel lgitimerss feknpidfle akgykevkkd liiklpkysl |
| | | 1201 felengrkrm lasagelqkg nelalpskyv nflylashye klkgspedne qkqlfveqhk |
| | | 1261 hyldeiieqi sefskrvila danldkvlsa ynkhrdkpir eqaeniihlf tltnlgapaa |
| | | 1321 fkyfdttidr krytstkevl datlihqsit glyetridls qlggd |
| No. | Proteins | Domains and amino acid positions |
| 1 | IscB(−HNH) | X domain: 51-97 |
| | EFH81386 | RuvC-I: 104-118 |
| | | Bridge Helix: 140-160 |
| | | RuvC-II: 169-212 |
| | | RuvC-III: 226-278 |
| 2 | IscB(+HNH) | X domain: 11-56 |
| | TAE54104.1 | RuvC-I: 63-77 |
| | | Bridge Helix: 100-121 |
| | | RuvC-II: 129-172 |
| | | HNH: 211-243 |
| | | RuvC-III: 279-321 |
| 3 | IscB(+HNH) | X domain: 4-50 |
| | WP_0380936 | RuvC-I: 57-71 |
| | 40.1 | Bridge Helix: 108-129 |
| | | RuvC-II: 138-181 |
| | | HNH: 220-252 |
| | | RuvC-III: 288-330 |
| 4 | IscB(+HNH) | X domain: 7-52 |
| | WP_0524903 | RuvC-I: 59-73 |
| | 48.1 | Bridge Helix: 100-121 |
| | | RuvC-II: 129-172 |
| | | HNH: 211-243 |
| | | RuvC-III: 279-322 |
| 5 | IscB(+HNH) | X domain: 7-52 |
| | WP_0153258 | RuvC-I: 61-75 |
| | 18.1 | Bridge Helix: 101-121 |
| | | RuvC-II: 132-175 |
| | | HNH: 215-247 |
| | | RuvC-III: 284-327 |
| 6 | sp\|G3ECR1\| | RuvC-I: 28-42 |
| | CAS9_STRTR | Bridge Helix: 85-108 |
| | | Rec: 118-736 |
| | | RuvC-II: 750-799 |
| | | HNH: 864-896 |
| | | RuvC-III: 957-1019 |
| | | PAM Interaction (PI): 1119-1409 |
| 7 | sp\|J7RUA5\| | RuvC-I: 7-21 |
| | CAS9_STAAU | Bridge Helix: 49-72 |
| | | Rec: 80-433 |
| | | RuvC-II: 445-493 |
| | | HNH: 553-585 |
| | | RuvC-III: 654-709 |
| | | PAM Interaction (PI): 789-1053 |
| 8 | Streptococcus_ | RuvC-I: 4-18 |
| | pyogenes_ | Bridge Helix: 61-84 |
| | SF370 | Rec: 94-718 |
| | | RuvC-II: 725-774 |
| | | HNH: 833-865 |
| | | RuvC-III: 926-988 |
| | | PAM Interaction (PI): 1099-1365 |

TABLE 3
Some other examples of the nucleic acid-guided nucleases are provided.

| ID | Sequences |
|---|---|
| 0181581_1004 | MSRVLVVDADRRVLAPCTARRARLLLSGGKAAVLRRYPFTIILKQSYPTASPRPVRLKLDPGSKTT |
| 2345_organized_- | GIAVVTEATGEVVWAAELQHRGQLIKDALESRRSLRSSRRNRKTRYRPPRWRNRKRTGPPVLSSA |
| organized_-_- | GEVNQLGKWLAPSLQHRIEVIMTWVHRLRRYLPITAISQEIVRFDMQKMQNPEISGVEYQQGTLFG |
| >_IscB(0.prot | FEVREYLLDKWHRRCGYCGAQNTRLEVDHIVPRSHGGSDRVSNLTLSCEPCNKKKSNRPAALFLA |
| SEQ ID | KKPEVLQKLQRQAKAPLKDAAAVNSTRYALLERLKATGLPVEIASGGRTKFNRFERQIPKTHWLD |
| NO: 2049 | AACVGASTPEVLQWEAVRPLAIKAMGHGKRQVTNVDAYGFPKGKPKGIPVHPFRTGDVIRAEVP |
| | VGKFAGNYVDRIVAIRTDQTRVSLPLRSQEKGKKKVPFLFQTKYITAKLFSADGYDYGFLQPPEPR |
| | TQRTES* |
| 0181587 1005 | MSRVLVVDADRRVLAPCTARRARLLLSGGKAAVLRRYPFTIILKQSYPTASPRPVRLKLDPGSKTT |
| 2842_organized_ | GIAVVTEATGEVVWAAELQHRGQLIKDALESRRSLRSSRRNRKTRYRPPRWRNRKRTGPPVLSSA |
| organized_-_- | GEVNQLGKWLAPSLQHRIEVIMTWVHRLRRYLPITAISQEIVRFDMQKMQNPEISGVEYQQGTLFG |
| >_IscB(0.prot | FEVREYLLDKWHRRCGYCGAQNTRLEVDHIVPRSHGGSDRVSNLTLSCEPCNKKKSNRPAALFLA |
| SEQ ID | KKPEVLQKLQRQAKAPLKDAAAVNSTRYALLERLKATGLPVEIASGGRTKFNRFERQIPKTHWLD |
| NO: 2050 | AACVGASTPEVLQWEAVRPLAIKAMGHGKRQVTNVDAYGFPKGKPKGIPVHPFRTGDVVRAEVP |
| | VGKFAGNYVDRIVAIRTDQTRVSLPLRSQEKGKKKVPFLFQTKYITAKLFSADGYDYGFLQPPEPR |
| | TQRTES* |
| 0211577_1000 | MSKVFVVDKERRPLAPCTPRRARLLLSECKASVLRQYPFTIILKESHATATPRPLRLKIYPASKTTG |
| 7484_organized_- | LAVINESTAEVVWAAELKHRGHLIKKALESRRSLRRGRRSRKTRYRPARWLNRVRKPPVFTNTEGV |
| organized_-_- | VVTGKWLPPSLQHRIEVVMTWVERLQHYLQITAISQEVMRFDTQKLQNPELSGVEYQQGTLHGYE |
| >_IscB(0.prot | VREYLLEKWSRKCAYCGARDTRLEISHLIARSRGGSDQVSNLTLACKACRDQKGDSNLEKFLATK |
| SEQ ID | PKILKKLQSQARVSLKDVAAINSTRLALLERLKATGLPVEVSSGGETKYNRNQQQIPKSHWLDAV |
| NO: 2051 | CVGASTPENLEWQQVKPLAIKAMGHGKRQMVNVDAFGFPRGKPKGIPVHPFRTGDIVRVTIPKGK |
| | YAGEYEERISSIKTSETRVGIPNKKEKGTIYLQTKYITAKIFSSDGYDYDYL* |
| 0211577_1005 | MSQVFVVDKERRPLAPCTPRRARLLLSECKASVFRRYPFTIILKESHATATPRPLRLKIYPASKTTG |
| 5383_organized_- | LAVINESTAEVVWAAELKHRSQLIKKALESRRSLRSGRRSRKTRYRPARWLNRVRNNPVFTNTEGA |
| organized_-_- | VITGKWLPPSLQHRVEVVMTWVERLQRYLPITALSQEIMRFDTQKLQNPEISGVEYQQGTLHGYE |
| >_IscB(0.prot | VREYLLEKWSRKCAYCGARDTRLEINHIVARSRGGSDRVSNLTLACRSCREQRGASNLEEFLATRP |
| SEQ ID | ALLMKLQSQAQVSLRDVAAINSTRFVLLERLKARGLPVEVSSGGETKFNRNQQQIPRSHWLNAVC |
| NO: 2052 | IGPNTPENLKWDQVQPLAIKAMGHGKRQMVNVDAFGFPRGKPKGTPVHPFRTGDVVRAAIPKGK |
| | YVGEYEERISSIKTSETRVGIPNKKGQGTIYLQTKYITTKIFSSDGFDYEFLTSES* |
| 0211577_1006 | MSQVFVVDKERRPLAPCTPRRARLLLSECKASVFRRYPFTIILKESHATATPRPLRLKIYPASKTTG |
| 4440_ | LAVINESTAEVVWAAELKHRSQLIKKALESRRSLRSGRRSRKTRYRPARWLNRVRNNPVFTNTEGA |
| organized_- | VITGKWLPPSLQHRVEVVMTWVERLQRYLPITALSQEIMRFDTQKLQNPEISGVEYQQGTLHGYE |
| organized_-_- | VREYLLEKWSRKCAYCGARDTRLEINHIVARSRGGSDRVSNLTLACRSCREQRGASNLEEFLATRP |
| >_IscB(0.prot | ALLMKLQSQAQVSLRDVAAINSTRFVLLERLKARGLPVEVSSGGETKFNRNQQQIPRSHWLNAVC |
| SEQ ID | IGPNTPENLKWDQVQPLAIKAMGHGKRQMVNVDAFGFPRGKPKGTPVHPFRTGDVVRAAIPKGK |
| NO: 2053 | YVGEYEERISSIKTSETRVGIPNKKGQGTIYLQTKYITTKIFSSDGFDYEFLTSES* |
| a0099850_100 | MSRVLVVDANRCPLAPCTPRRARLLLNSGKAAVLRRYPFTIILKQSYPTANPRPVRLKLDPGSKTT |
| 2913_organized_- | GIAVVTEATGEVVWAAELQHRGQLIKNALESRRSLRRGRRNRKTRYRPARWLNRKRTGPPVLSSA |
| organized_-_- | DTVSTLGKWLAPSLQHRIEVIMTWVHRLRRYLPITAISQEIVRFDMQKMQNPEISGVEYQQGTLFG |
| >_cas9 | YEVREYLLDKWQRQCGYCGAKDKRLEVDHIVPRSHGGSDRVSNLTLSCEPCNKRKNQRPAAVFL |
| (209.prot | AKKPEVLQKLQRQAKAPLKDAAAVNSTRYALLERLKATGLPVEIASGGRTKFNRSERQIPKTHWL |
| SEQ ID | DAACVGASTPEVLQWKAVKPLAIKAMGHGKRQVVNVDAYGFPRGKAKGIPVHPFRTGDIVRAEI |
| NO: 2054 | PKGKYVGTYVSRIAETTTSKPLAGFKSKTGKRIQCHTKHMTKLFNSDGYGYGFLKAPEPRQTVISE |
| | S* |
| a0208542 100 | MSRVLVVDADRCPLAPCTPRRARLLLNSGKAAVLRRYPFTIILKQSYPTASPRPVRLKLDPGSKTT |
| 2724_organized_- | GIAVVTEATGEVVWAAELQHRGQLIKNALESRRSLRRGRRNRKTRYRPARWLNRKRTGPPLLSSA |
| organized_-_- | DTVSTLGKWLAPSLQHRIEVIMTWVHRLRRYLPITAISQEIVRFDMQKMQNPEISGVEYQQGTLFG |
| >_IscB(0.prot | YEVREYLLDKWRRQCGYCGAKDKRLEVDHIVPRSHGGSDRVSNLTLSCEPCNKRKNQRPAAVFL |
| SEQ ID | AKKPEVLQKLQRQAKAPLKDAAAVNSTRYALLERLKATGLPVEVASGGRTKFNRSERQIPKTHW |
| NO: 2055 | LDAACVGASTPEVLQWEAVRPLAIKAMGHGKRQVVNVDAYGFPRGKAKGIPVHPFRTGDIVRAEI |
| | PKGKYVGTYVSRIAETTTSKPLAGFKSKTGKRIQCHTKHMTKLFNSDGYGYGFLKAPEPRQTVISE |
| | S* |
| AGAU010000 | MSKVFVVDKERRPLAPCTPRRARLLLSECKASVLRQYPFTIILKESHATATPRPLRLKIYPASKTTG |
| 46.1_organized_- | LAVINESTAEVVWAAELKHRGHLIKKALESRRSLRRGRRSRKTRYRPARWLNRVRKPPVLTNTEGV |
| organized_-_- | VVTGKWLPPSLQHRIKVVMTWVERLQHYLQITALSQEVMRFDTQKLQNPEISGVWYQQGTLHGY |
| >_IscB(26.prot | EVREYLLEKWSRKCAYCGARDTRLEISHLIARSRGGSDQVSNLTLACKACRDQKGDSNLEKFLAT |
| SEQ ID | KPKILKKLQSQARVSLKDVAAINSTRLALLERLKATGLPVEVSSGGETKYNRNQQQIPKSHWLDA |
| NO: 2056 | VCVGASTPENLEWQQVNPLAIKAMGHGKRQMVNVDAFGFPRGKPKGIPVHPFRTGDIVRVTIPKG |
| | KYAGEYEERISSIKTSETRVGIPNKKEKGTIYLQTKYITAKIFSSDGYEYYFYPNK* |
| Ga0348337_01 | MSRVLVVDADRCPLAPCTPRRARLLLNSGKAAVLRRYPFTIILKQSYPTASPRPVRLKLDPGSKTT |
| 8242_ | GIAVVTEATGEVVWAAELQHRGQLIKNALESRRSLRRGRRNRKTRYRPARWLNRKRTGPPLLSSA |
| organized_- | DTVSTLGKWLAPSLQHRIEVIMTWVHRLRRYLPITAISQEIVRFDMQKMQNPEISGVEYQQGTLFG |
| organized_-_- | YEVREYLLDKWRRQCGYCGAKDKRLEVDHIVPRSHGGSDRVSNLTLSCEPCNKRKNQRPAAVFL |
| >_IscB(0.prot | AKKPEVLQKLQRQAKAPLKDAAAVNSTRYALLERLKATGLPVEVASGGRTKFNRSERQIPKTHW |
| SEQ ID | LDAACVGASTPEVLQWEAVRPLAIKAMGHGKRQVVNVDAYGFPRGKAKGIPVHPFRTGDIVRAEI |
| NO: 2057 | PKGKYVGTYVSRIAETTTSKPLAGFKSKTGKRIQCHTKHMTKLFNSDGYGYGFLKAPEPRQTVISE |
| | S* |

[0250] In some examples, the IscB protein shares at least 80%, at least 85%, at least 90%, at least 95%, at least 99%, or 100% sequence identity with a IscB protein selected from Tables 1 and 2.

[0251] In one embodiment, the nucleic acid-guided nucleases that comprise an X domain and a Y domain are IscB proteins. The IscB protein may be homolog or ortholog of IscB proteins described in Kapitonov V V et al., ISC, a Novel Group of Bacterial and Archaeal DNA Transposons That Encode Cas9 Homologs, J Bacteriol. 2015 Dec. 28; 198(5):797-807. doi: 10.1128/JB.00783-15, which is incorporated by reference herein in its entirety.

[0252] In one embodiment, the nucleic acid-guided nucleases are smaller compared to previously identified Cas proteins. The nucleic acid-guided nucleases and related systems described herein may allow an increased access to the site of target polynucleotide binding, which has several advantages. For example, they can allow easier access to the target polynucleotide for functional domains fused to the nucleic acid-guided nucleases or provided in trans. In an embodiment, the RNA:DNA duplex formed by guide molecules that form complex with the nucleic acid-guided nucleases is substantially more exposed to the environment and/or functional domains present in proximity of the DNA:RNA complex than the duplexes formed by Cas proteins known in the art. In an embodiment, the nucleic acid-guided nucleases confer a different degree of stability of the RNA:DNA duplex. In an embodiment, the nucleic acid-guided nucleases enable direct targeting of the DNA:RNA complex by one or more functional domains.

[0253] In an embodiment, the nucleic acid-guided nucleases and related compositions have no or limited target specificity. For example, a target polynucleotide does not need to have a specific sequence to be targeted by the nucleic acid-guided nucleases and related compositions. In an embodiment, the nucleic acid-guided nucleases and related compositions do not have a PAM requirement, in that there is no sequence requirement outside of the target sequence which defines target specificity. In some cases, the target specificity of the nucleic acid-guided nucleases and related compositions may be determined by the sequence of the guide molecule only, not any sequence within the target polynucleotide. In alternative embodiments, the nucleic acid-guided nucleases and related compositions has a target specificity, more particularly the binding of the nucleic acid-guided nucleases-guide complex is PAM-dependent. The nucleic acid-guided nucleases and related systems may be modified to include PAM specificity (as described in Kleinstiver et al. 2015; Hirano et al. Mol. Cell 2016).

[0254] In an embodiment, the nucleic acid-guided nucleases correspond to a naturally occurring protein, a modified naturally occurring protein, functional fragment or truncated version thereof, or a non-naturally occurring protein. In an embodiment, the nucleic acid-guided nucleases comprises one or more domains originating from other nucleic acid-guided nucleases, more particularly originating from different organisms. In an embodiment, the nucleic acid-guided nucleases may be designed by in silico approaches. Examples of in silico protein design have been described in the art and are therefore known to a skilled person.

[0255] In embodiments, the nucleic acid-guided nucleases also encompasses a homologs or an orthologs of nucleic acid-guided nucleases whose sequences are specifically described herein. The terms “ortholog” and “homolog” are well known in the art. By means of further guidance, a “homolog” of a protein as used herein is a protein of the same species which performs the same or a similar function as the protein it is a homolog of. Homologous proteins may but need not be structurally related, or are only partially structurally related. An “ortholog” of a protein as used herein is a protein of a different species which performs the same or a similar function as the protein it is an orthologue of. Orthologous proteins may but need not be structurally related, or are only partially structurally related. In one embodiment, the homolog or ortholog of a nucleic acid-guided nucleases such as referred to herein has a sequence homology or identity of at least 80%, at least 85%, at least 90%, at least 95% with a nucleic acid-guided nuclease. In further embodiments, the homolog or ortholog of a nucleic acid-guided nuclease has a sequence identity of at least 80%, at least 85%, at least 90%, or at least 95% with a wildtype nucleic acid-guided nuclease.

[0256] Further orthologs of known nucleic acid-guided nuclease may be identified. Some methods of identifying orthologs of nucleic acid-guided nucleases may involve identifying tracr sequences in genomes of interest. Identification of tracr sequences may relate to the following steps: Search for the direct repeats or tracr mate sequences in a database to identify a region comprising a nucleic acid-guided nuclease. Search for homologous sequences in the region flanking the nucleic acid-guided nuclease in both the sense and antisense directions. Look for transcriptional terminators and secondary structures. Identify any sequence that is not a direct repeat or a tracr mate sequence but has more than 50% identity to the direct repeat or tracr mate sequence as a potential tracr sequence. Take the potential tracr sequence and analyze for transcriptional terminator sequences associated therewith.

[0257] A chimeric enzyme can comprise a first fragment and a second fragment, and the fragments can be of nucleic acid-guided nuclease orthologs of organisms of a genuses or of species, e.g., the fragments are from nucleic acid-guided nuclease orthologs of different species.

### Domains

[0258] In some examples, the nucleic-acid guided nuclease, e.g. Cas IscB, comprises an N-terminal X domain, a RuvC domain (e.g., including a RuvC-I, RuvC-II, and RuvC-III subdomains), a Bridge Helix domain, and a C-terminal Y domain. In some examples, the nucleic-acid guided nuclease comprises In some examples, the nucleic-acid guided nuclease comprises an N-terminal X domain, a RuvC domain (e.g., including a RuvC-I, RuvC-II, and RuvC-III subdomains), a Bridge Helix domain, an HNH domain, and a C-terminal Y domain.

### X Domain

[0259] The Cas IscB nucleic-acid guided nuclease comprises an X domain, e.g., at its N-terminal.

[0260] In an embodiment, the X domain include the X domains in Table 2. Examples of the X domains also include any polypeptides a structural similarity and/or sequence similarity to a X domain described in the art. In some examples, the X domain may have an amino acid sequence that share at least 50%, at least 55%, at least 60%, at least 5%, at least 70%, at least 75%, at least 80%, at least 85%, at least 90%, at least 95%, at least 99%, or 100% sequence identity with X domains in Table 2.

[0261] In some examples, the X domain may be no more than 10, no more than 20, no more than 30, no more than 40, no more than 50, no more than 60, no more than 70, no more than 80, no more than 90, or no more than 100 amino acids in length. For example, the X domain may be no more than 50 amino acids in length, such as comprising 2 3, 4, 5, 6, 7, 8, 9, 10, 11, 12, 13, 14, 15, 16, 17, 18, 19, 20, 21, 22, 23, 24, 25, 26, 27, 28, 29, 30, 31, 32, 33, 34, 35, 36, 37, 38, 39, 40, 41, 42, 43, 44, 45, 46, 47, 48, 49, or 50 amino acids in length.

### Y Domain

[0262] The Cas IscB nucleic-acid guided nuclease comprises an Y domain, e.g., at its C-terminal.

[0263] In an embodiment, the X domain include Y domains in Table 2. Examples of the Y domain also include any polypeptides a structural similarity and/or sequence similarity to a Y domain described in the art. In some examples, the Y domain may have an amino acid sequence that share at least 50%, at least 55%, at least 60%, at least 5%, at least 70%, at least 75%, at least 80%, at least 85%, at least 90%, at least 95%, at least 99%, or 100% sequence identity with Y domains in Table 2.

### RuvC Domain

[0264] In one embodiment, the nucleic acid-guided nuclease comprises at least one nuclease domain. In an embodiment, the nucleic acid-guided nuclease protein comprises at least two nuclease domains. In an embodiment, the one or more nuclease domains are only active upon presence of a cofactor. In an embodiment, the cofactor is Magnesium (Mg). In embodiments where more than one nuclease domain is present and the substrate is a double-strand polynucleotide, the nuclease domains each cleave a different strand of the double-strand polynucleotide. In an embodiment, the nuclease domain is a RuvC domain.

[0265] The nucleic-acid guided nuclease comprises a RuvC domain. The RuvC domain may comprise multiple subdomains, e.g., RuvC-I, RuvC-II and RuvC-III. The subdomains may be separated by interval sequences on the amino acid sequence of the protein.

[0266] In an embodiment, Examples of the RuvC domain include those in Table 2. Examples of the RuvC domain also include any polypeptides a structural similarity and/or sequence similarity to a RuvC domain described in the art. For example, the RuvC domain may share a structural similarity and/or sequence similarity to a RuvC of Cas9. In some examples, the RuvC domain may have an amino acid sequence that share at least 50%, at least 55%, at least 60%, at least 5%, at least 70%, at least 75%, at least 80%, at least 85%, at least 90%, at least 95%, at least 99%, or 100% sequence identity with RuvC domains in Table 2.

[0267] In some examples, the RuvC domain comprise RuvC-I polypeptide, RuvC-II polypeptide, and RuvC-III polypeptide. Examples of the RuvC-I domain also include any polypeptides a structural similarity and/or sequence similarity to a RuvC-I domain described in the art. For example, the RuvC-I domain may share a structural similarity and/or sequence similarity to a RuvC-I of Cas9. In some examples, the RuvC domain may have an amino acid sequence that share at least 50%, at least 55%, at least 60%, at least 5%, at least 70%, at least 75%, at least 80%, at least 85%, at least 90%, at least 95%, at least 99%, or 100% sequence identity with RuvC-I domain in Table 3. The RuvC-II domain also include any polypeptides a structural similarity and/or sequence similarity to a RuvC-II domain described in the art. For example, the RuvC-II domain may share a structural similarity and/or sequence similarity to a RuvC-II of Cas9. In some examples, the RuvC domain may have an amino acid sequence that share at least 50%, at least 55%, at least 60%, at least 5%, at least 70%, at least 75%, at least 80%, at least 85%, at least 90%, at least 95%, at least 99%, or 100% sequence identity with RuvC-II domains in Table 2. The RuvC-III domain also include any polypeptides a structural similarity and/or sequence similarity to a RuvC-III domain described in the art. For example, the RuvC-III domains may share a structural similarity and/or sequence similarity to a RuvC-III of Cas9. In some examples, the RuvC domain may have an amino acid sequence that share at least 50%, at least 55%, at least 60%, at least 5%, at least 70%, at least 75%, at least 80%, at least 85%, at least 90%, at least 95%, at least 99%, or 100% sequence identity with RuvC-III domains in Table 2.

[0268] For example, and as described in the art (e.g. Crystal structure of Cas9 in complex with guide RNA and target DNA, Nishimasu et al. Cell, 2014) the RuvC domain of Cas9 consists of a six-stranded mixed β-sheet (β1, β2, β5, β11, β14 and β17) flanked by α-helices (α33, α34 and α39-α45) and two additional two-stranded antiparallel β-sheets (03/04 and β15/β16). It has been described that the RuvC domain of Cas9 shares structural similarity with the retroviral integrase superfamily members characterized by an RNase H fold, such as Escherichia coli RuvC (PDB code 1HJR, 14% identity, root-mean-square deviation (rmsd) of 3.6 Å for 126 equivalent Cα atoms) and Thermus thermophilus RuvC (PDB code 4LD0, 12% identity, rmsd of 3.4 Å for 131 equivalent Cα atoms). RuvC nucleases have four catalytic residues (e.g., Asp7, Glu70, His143 and Asp146 in T. thermophilus RuvC), and cleave Holliday junctions through a two-metal mechanism. Asp10 (Ala), Glu762, His983 and Asp986 of the Cas9 RuvC domain are located at positions similar to those of the catalytic residues of T. thermophilus RuvC. There are key structural discrepancies between the Cas9 RuvC domain and the RuvC nucleases, which explain their functional differences. Unlike the Cas9 RuvC domain, the RuvC nucleases form dimers and recognize Holliday junctions. In addition to the conserved RNase H fold, the Cas9 RuvC domain has other structural elements involved in interactions with the guide:target heteroduplex (an end-capping loop between α42 and α43) and the PI domain/stem loop 3 (β-hairpin formed by β3 and β4).

### Bridge Helix

[0269] The nucleic-acid guided nuclease comprises a bridge helix (BH) domain. The bridge helix domain refers to a helix and arginine rich polypeptide. The bridge helix domain may be located next to anyone of the amino acid domains in the nucleic-acid guided nuclease. In one embodiment, the bridge helix domain is next to a RuvC domain, e.g., next to RuvC-I, RuvC-II, or RuvC-III subdomain. In one example, the bridge helix domain is between a RuvC-1 and RuvC2 subdomains.

[0270] The bridge helix domain may be from 10 to 100, from 20 to 60, from 30 to 50, e.g., 35, 36, 37, 38, 39, 40, 41, 42, 43, 44, 45, 46 or 47, 48, 49, or 50 amino acids in length. Examples of bridge helix includes the polypeptide of amino acids 60-93 of the sequence of S. pyogenes Cas9.

[0271] In an embodiment, examples of the BH domain include those in Table 2. Examples of the BH domain also include any polypeptides a structural similarity and/or sequence similarity to a BH domain described in the art. For example, the BH domain may share a structural similarity and/or sequence similarity to a BH domain of Cas9. In some examples, the BH domain may have an amino acid sequence that share at least 50%, at least 55%, at least 60%, at least 5%, at least 70%, at least 75%, at least 80%, at least 85%, at least 90%, at least 95%, at least 99%, or 100% sequence identity with BH domains in Table 2.

### HNH Domain

[0272] The nucleic-acid guided nuclease comprises a HNH domain. In an embodiment, at least one nuclease domain shares a substantial structural similarity or sequence similarity to a HNH domain described in the art.

[0273] In some examples, the nucleic acid-guided nuclease comprises a HNH domain and a RuvC domain. In the cases where the RuvC domain comprises RuvC-I, RuvC-II, and RuvC-III domain, the HNH domain may be located between the Ruv C II and RuvC III subdomains of the RuvC domain.

[0274] In an embodiment, examples of the HNH domain include those in Table 2. Examples of the HNH domain also include any polypeptides a structural similarity and/or sequence similarity to a HNH domain described in the art. For example, the HNH domain may share a structural similarity and/or sequence similarity to a HNH domain of Cas9. In some examples, the HNH domain may have an amino acid sequence that share at least 50%, at least 55%, at least 60%, at least 5%, at least 70%, at least 75%, at least 80%, at least 85%, at least 90%, at least 95%, at least 99%, or 100% sequence identity with HNH domains in Table 2.

[0275] For example, the HNH domain of Cas9 as described in the art (e.g. Crystal structure of Cas9 in complex with guide RNA and target DNA, Nishimasu et al. Cell, 2014) comprises a two-stranded antiparallel R-sheet (312 and β13) flanked by four α-helices (α35-α38). It shares structural similarity with the HNH endonucleases characterized by a ββα-metal fold, such as phage T4 endonuclease VII (Endo VII) (PDB code 2QNC, 20% identity, rmsd of 2.7 Å for 61 equivalent Cα atoms) and Vibrio vulnificus nuclease (PDB code 1OUP, 8% identity, rmsd of 2.7 Å for 77 equivalent Cα atoms). HNH nucleases have three catalytic residues (e.g., Asp40, His41, and Asn62 in Endo VII), and cleave nucleic acid substrates through a single-metal mechanism. In the structure of the Endo VII N62D mutant in complex with a Holliday junction, a Mg2+ ion is coordinated by Asp40, Asp62, and the oxygen atoms of the scissile phosphate group of the substrate, while His41 acts as a general base to activate a water molecule for catalysis. Asp839, His840, and Asn863 of the Cas9 HNH domain correspond to Asp40, His41, and Asn62 of Endo VII, respectively, consistent with the observation that His840 is critical for the cleavage of the complementary DNA strand. The N863A mutant functions as a nickase, indicating that Asn863 participates in catalysis. The Cas9 HNH domain may cleave the complementary strand of the target DNA through a single-metal mechanism, as observed for other HNH superfamily nucleases. Although the Cas9 HNH domain shares a ββα-metal fold with other HNH endonucleases, their overall structures are distinct, consistent with the differences in their substrate specificities.

[0276] In an embodiment, the nucleic-acid guided nuclease comprises at least a HNH or RuvC nuclease domain. In an embodiment, the nucleic-acid guided nuclease comprises at least one reduced or minimal HNH or RuvC nuclease domain. In one embodiment, the nucleic-acid guided nuclease comprises two nuclease domains. In an embodiment, the two nuclease domains are a HNH and a RuvC domain. In an embodiment, the nucleic-acid guided nuclease comprises at least one nuclease domain substantially similar to a HNH or RuvC domain by sequence similarity. In an embodiment, the nucleic-acid guided nuclease comprises at least one nuclease domain substantially similar to a HNH or RuvC domain by structural similarity.

[0277] In one embodiment, the nucleic acid-guided nucleases are in part characterizable by the nature of the guide molecule that ensures formation of the nucleic acid-guided nuclease complex and binding to the target sequence. The guide molecule envisaged for use with a nucleic acid-guided nucleases capable of specifically hybridizing to a target sequence, directing binding of the complex formed by said nucleic acid-guided nucleases and guide sequence to said target sequence. In an embodiment, the target sequence is a coding sequence. In an embodiment, the target sequence is a noncoding sequence. By means of example, noncoding sequences include noncoding functional RNA, cis- and trans-regulatory elements, introns, pseudogenes, repeat sequences, transposons, viral elements, and telomeres. Examples of noncoding functional RNA include ribosomal RNA, transfer RNA, piwi-interacting RNA and microRNA. In an embodiment, the target sequence may be a regulatory DNA sequence. Non-limiting examples of regulatory DNA sequences are transcription factors, operators, enhancers, silencers, promoters, and insulators.

[0278] In one embodiment, where the nucleic acid-guided nucleases is a reduced version of a nucleic acid-guided nuclease, the guide molecule envisaged for use can be the guide RNA which is known to function with the corresponding full length nucleic acid-guided nucleases. Features of the guide molecules are detailed herein below.

[0279] In one embodiment, the compositions and systems are characterized by elements that promote the formation of a complex at the site of a target sequence (also referred to as a protospacer in the context of an endogenous system). In the context of formation of a complex, “target sequence” refers to a sequence to which a guide sequence is designed to target, e.g., have complementarity, where hybridization between a target sequence and a guide sequence promotes the formation of a complex. The section of the guide sequence through which complementarity to the target sequence is important for cleavage activity is referred to herein as the seed sequence. A target sequence may comprise any polynucleotide, such as DNA or RNA polynucleotides and is comprised within a target locus of interest. In one embodiment, a target sequence is located in the nucleus or cytoplasm of a cell.

### PAM Specificity

[0280] In one embodiment, the nucleic acid-guided nucleases and related compositions do not contain a PAM specificity. In certain examples, the nucleic acid-guided nucleases lack or substantially lack a PAM interacting (PI) domain. In an embodiment, the nucleic acid-guided nucleases may have a PI domain or a functional fragment of a PI domain. In an embodiment, the nucleic acid-guided nucleases may achieve a target specificity by a non-protein domain. In an embodiment, the nucleic acid-guided nucleases may have helicase activity. In an embodiment, the nucleic acid-guided nucleases may have reduced helicase activity compared to Cas proteins known in the art. In an embodiment, the nucleic acid-guided nucleases may comprise additional components that contribute in mediating target recognition. In an embodiment, targeting specificity is obtained by a central hairpin structure in a guide molecule.

[0281] Examples of PAM sequences for the nucleic acid-guided nucleases herein include NGG and NAC. For example, the nucleic acid-guided nucleases may recognize PAM sequence NAC.

[0282] The PAM interaction domain or PI domain as referred to herein is reported to be responsible for determining PAM specificity of nucleic acid-guided nucleases (e.g., IscB proteins). By means of example, the PI domain is contained in the NUC lobe and forms an elongated structure comprising seven α-helices, a three-stranded antiparallel β-sheet, a five-stranded antiparallel β-sheet, and a two-stranded antiparallel β-sheet.

[0283] In some cases, where the nucleic acid-guided nucleases do have a PAM requirement, the precise sequence and length requirements for the PAM will differ depending on the nucleic acid-guided nucleases used. In some examples, PAMs are typically 2-5 base pair sequences adjacent the protospacer (that is, the target sequence). Examples of the natural PAM sequences for different nucleic acid-guided nucleases orthologs have been identified and the skilled person will be able to identify further PAM sequences for use with a given nucleic acid-guided nucleases.

[0284] Further, associating a PAM Interacting (PI) domain (e.g., attaching or fusing) to a nucleic acid-guided nuclease may allow programing of PAM specificity, improve target site recognition fidelity, and increase the versatility of the IscB, genome engineering platform. nucleic acid-guided nucleases may be engineered to alter their PAM specificity, for example as described in Kleinstiver B P et al. Engineered CRISPR-Cas9 nucleases with altered PAM specificities. Nature. 2015 Jul. 23; 523(7561):481-5. doi: 10.1038/nature14592. The skilled person will understand that other IscB proteins may be modified analogously.

[0285] The crystal structure information (described in U.S. Provisional Patent Application Nos. 61/915,251 filed Dec. 12, 2013, 61/930,214 filed on Jan. 22, 2014, 61/980,012 filed Apr. 15, 2014; and Nishimasu et al, “Crystal Structure of Cas9 in Complex with Guide RNA and Target DNA,” Cell 156(5):935-949, DOI: dx.doi.org/10.1016/j.cell.2014.02.001 (2014), each and all of which are incorporated herein by reference) provides structural information to truncate and create modular or multi-part CRISPR enzymes which may be incorporated into inducible composition. In particular, structural information is provided for S. pyogenes Cas9 (SpCas9), and this may be extrapolated to other Cas9 orthologs or IscB proteins (as well as homologs and orthologs thereof) or other nucleic acid-guided nucleases. In one embodiment, the conformational variations in the crystal structures of the CRISPR-Cas9 system or of components of the CRISPR-Cas9 provide important and critical information about the flexibility or movement of protein structure regions relative to nucleotide (RNA or DNA) structure regions that may be important for the function of other nucleic acid-guided nucleases and related systems. The structural information provided for Cas9 (e.g. S. pyogenes Cas9) as the nucleic acid-guided nuclease in the present application may be used to further engineer and optimize the other nucleic acid-guided nucleases and related system and this may be extrapolated to interrogate structure-function relationships in other nucleic acid-guided nucleases and related systems.

### Protein Modifications

[0286] The nucleic acid-guided nucleases may comprise one or more modifications. As used herein, the term “modified” with regard to a nucleic acid-guided nuclease generally refers to a nucleic acid-guided nuclease having one or more modifications or mutations (including point mutations, truncations, insertions, deletions, chimeras, fusion proteins, etc.) compared to the wild type counterpart from which it is derived. By derived is meant that the derived enzyme is largely based, in the sense of having a high degree of sequence homology with, a wildtype enzyme, but that it has been mutated (modified) in some way as known in the art or as described herein.

[0287] The modified proteins, e.g., modified nucleic acid-guided nuclease may be catalytically inactive (also referred as dead). As used herein, a catalytically inactive or dead nuclease may have reduced or no nuclease activity compared to a wildtype counterpart nuclease. In some cases, a catalytically inactive or dead nuclease may have nickase activity. In some cases, a catalytically inactive or dead nuclease may not have nickase. Such a catalytically inactive or dead nuclease may not make either double-strand or single-strand break on a target polynucleotide, but may still bind or otherwise form complex with the target polynucleotide.

[0288] In one embodiment, the modifications of the nucleic acid-guided nuclease may or may not cause an altered functionality. By means of example, modifications which do not result in an altered functionality include for instance codon optimization for expression into a particular host, or providing the nuclease with a particular marker (e.g. for visualization). Modifications with may result in altered functionality may also include mutations, including point mutations, insertions, deletions, truncations (including split nucleases), etc., as well as chimeric nucleases (e.g. comprising domains from different orthologues or homologues) or fusion proteins. Fusion proteins may without limitation include, for instance, fusions with heterologous domains or functional domains (e.g. localization signals, catalytic domains, etc.). In an embodiment, various different modifications may be combined (e.g. a mutated nuclease which is catalytically inactive and which further is fused to a functional domain, such as for instance to induce DNA methylation or another nucleic acid modification, such as including without limitation, a break (e.g. by a different nuclease (domain)), a mutation, a deletion, an insertion, a replacement, a ligation, a digestion, a break or a recombination). As used herein, “altered functionality” includes without limitation an altered specificity (e.g. altered target recognition, increased (e.g. “enhanced” nucleic acid-guided nuclease) or decreased specificity, or altered PAM recognition), altered activity (e.g. increased or decreased catalytic activity, including catalytically inactive nucleases or nickases), and/or altered stability (e.g. fusions with destabilization domains). Examples of all these modifications are known in the art. It will be understood that a “modified” nuclease as referred to herein, and in particular a “modified” nucleic acid-guided nuclease or system or complex preferably still has the capacity to interact with or bind to the polynucleic acid (e.g. in complex with the guide molecule). Such modified nucleic acid-guided nuclease can be combined with the deaminase protein or active domain thereof as described herein.

[0289] In one embodiment, an unmodified nucleic acid-guided nucleases may have cleavage activity. In one embodiment, the nucleic acid-guided nucleases may direct cleavage of one or both nucleic acid (DNA or RNA) strands at the location of or near a target sequence, such as within the target sequence and/or within the complement of the target sequence or at sequences associated with the target sequence. In one embodiment, the nucleic acid-guided nucleases may direct cleavage of one or both DNA or RNA strands within about 1, 2, 3, 4, 5, 6, 7, 8, 9, 10, 15, 20, 25, 50, 100, 200, 500, or more base pairs or nucleotides from the first or last nucleotide of a target sequence. In one embodiment, the cleavage may be staggered, i.e. generating sticky ends. In one embodiment, the cleavage is a staggered cut with a 5′ overhang. In one embodiment, the cleavage is a staggered cut with a 5′ overhang of 1 to 5 nucleotides, preferably of 4 or 5 nucleotides.

[0290] In one embodiment, the cleavage site is distant from the PAM, e.g., the cleavage occurs after the 18th nucleotide on the non-target strand and after the 23rd nucleotide on the targeted strand. In one embodiment, the cleavage site occurs after the 18th nucleotide (counted from the PAM) on the non-target strand and after the 23rd nucleotide (counted from the PAM) on the targeted strand. In one embodiment, a vector encodes a nucleic acid-targeting effector protein that may be mutated with respect to a corresponding wild-type enzyme such that the mutated nucleic acid-targeting effector protein lacks the ability to cleave one or both DNA and RNA strands of a target polynucleotide containing a target sequence. As a further example, two or more catalytic domains of a nucleic acid-guided nuclease (e.g. RuvC I, RuvC II, and RuvC III or the HNH domain) may be mutated to produce a mutated nucleic acid-guided nuclease substantially lacking all DNA cleavage activity. As described herein, corresponding catalytic domains of a nucleic acid-guided nuclease may also be mutated to produce a mutated nucleic acid-guided nuclease lacking all DNA cleavage activity or having substantially reduced DNA cleavage activity. In one embodiment, a nucleic acid-guided nuclease may be considered to substantially lack all polynucleotide cleavage activity when the polynucleotide cleavage activity of the mutated enzyme is no more than 25%, no more than 10%, no more than 5%, no more than 1%, no more than 0.1%, no more than 0.01% of the nucleic acid cleavage activity of the non-mutated form of the enzyme; an example can be when the nucleic acid cleavage activity of the mutated form is nil or negligible as compared with the non-mutated form. An nucleic acid-guided nuclease may be identified with reference to the general class of enzymes that share homology to the biggest nuclease with multiple nuclease domains from the Type I, II, III, IV, V, or VI CRISPR systems.

[0291] In an embodiment, the nuclease domains of the nucleic acid-guided nuclease are catalytically inactive, or modified to be catalytically inactive, or when the protein is a nickase. In an embodiment, both nuclease domains are catalytically inactive.

[0292] In an embodiment, the nucleic acid-guided nuclease may comprise one or more modifications resulting in enhanced activity and/or specificity, such as including mutating residues that stabilize the targeted or non-targeted strand (e.g. eCas9; “Rationally engineered Cas9 nucleases with improved specificity”, Slaymaker et al. (2016), Science, 351(6268):84-88, incorporated herewith in its entirety by reference). In an embodiment, the altered or modified activity of the engineered nucleic acid-guided nuclease comprises increased targeting efficiency or decreased off-target binding. In an embodiment, the altered activity of the engineered nucleic acid-guided nuclease comprises modified cleavage activity. In an embodiment, the altered activity comprises increased cleavage activity as to the target polynucleotide loci. In an embodiment, the altered activity comprises decreased cleavage activity as to the target polynucleotide loci. In an embodiment, the altered activity comprises decreased cleavage activity as to off-target polynucleotide loci. In an embodiment, the altered or modified activity of the modified nuclease comprises altered helicase kinetics. In an embodiment, the modified nuclease comprises a modification that alters association of the protein with the nucleic acid molecule comprising RNA, or a strand of the target polynucleotide loci, or a strand of off-target polynucleotide loci. In an aspect of the invention, the engineered nucleic acid-guided nuclease comprises a modification that alters formation of the nucleic acid-guided nuclease and related complex. In an embodiment, the altered activity comprises increased cleavage activity as to off-target polynucleotide loci. Accordingly, in an embodiment, there is increased specificity for target polynucleotide loci as compared to off-target polynucleotide loci. In other embodiments, there is reduced specificity for target polynucleotide loci as compared to off-target polynucleotide loci. In an embodiment, the mutations result in decreased off-target effects (e.g. cleavage or binding properties, activity, or kinetics), such as in case for nucleic acid-guided nuclease for instance resulting in a lower tolerance for mismatches between target and guide RNA. Other mutations may lead to increased off-target effects (e.g. cleavage or binding properties, activity, or kinetics). Other mutations may lead to increased or decreased on-target effects (e.g. cleavage or binding properties, activity, or kinetics). In an embodiment, the mutations result in altered (e.g. increased or decreased) helicase activity, association or formation of the functional nuclease complex. In an embodiment, the mutations result in an altered PAM recognition, i.e. a different PAM may be (in addition or in the alternative) be recognized, compared to the unmodified nucleic acid-guided nuclease. Examples mutations include positively charged residues and/or (evolutionary) conserved residues, such as conserved positively charged residues, in order to enhance specificity. In an embodiment, such residues may be mutated to uncharged residues, such as alanine.

### Guide Sequences

[0293] The systems herein may further comprise one or more CRISPR-associated guide molecules. A CRISPR-associated guide molecule may form a complex with a nucleic acid-guided nuclease, and direct the complex to bind with a target sequence. In some examples, the CRISPR-associated guide molecule may comprise a first and second nucleic acid molecules, the first and second nucleic acid molecules capable of forming a duplex, the duplex capable of forming a complex with the nucleic acid-guided nuclease, wherein the second nucleic acid molecule is a recombinant molecule comprising a heterologous CRISPR-associated guide sequence capable of directing site-specific binding of the complex to a target sequence of a target polynucleotide. In some examples, the single CRISPR-associated guide molecule capable of forming a complex with the nucleic acid-guided nuclease and directing site-specific binding of the complex to a target sequence of a target polynucleotide.

[0294] As used herein, a heterologous CRISPR-associated guide molecule is a CRISPR-associated guide molecule that is not derived from the same species as the nucleic acid-guided nuclease. For example, a heterologous CRISPR-associated guide molecule of a nucleic acid-guided nuclease derived from species A is a polynucleotide derived from a species different from species A, or an artificial polynucleotide.

[0295] As used herein, the term “CRISPR-associated guide sequence” or “CRISPR-associated guide molecules” has the meaning as used herein elsewhere and comprises any polynucleotide sequence having sufficient complementarity with a target nucleic acid sequence to hybridize with the target nucleic acid sequence and direct sequence-specific binding of a nucleic acid-targeting complex to the target nucleic acid sequence. In one embodiment, the degree of complementarity of the CRISPR-associated guide sequence to a given target sequence, when optimally aligned using a suitable alignment algorithm, is about or more than 50%, 60%, 75%, 80%, 85%, 90%, 95%, 97.5%, 99%, or more. In certain example embodiments, the CRISPR-associated guide molecule comprises a CRISPR-associated guide sequence that may be designed to have at least one mismatch with the target sequence, such that a RNA duplex formed between the CRISPR-associated guide sequence and the target sequence. Accordingly, the degree of complementarity is less than 99%. For instance, where the CRISPR-associated guide sequence consists of 24 nucleotides, the degree of complementarity is more particularly about 96% or less. In one embodiment, the CRISPR-associated guide sequence is designed to have a stretch of two or more adjacent mismatching nucleotides, such that the degree of complementarity over the entire CRISPR-associated guide sequence is further reduced. For instance, where the CRISPR-associated guide sequence consists of 24 nucleotides, the degree of complementarity is more particularly about 96% or less, more particularly, about 92% or less, more particularly about 88% or less, more particularly about 84% or less, more particularly about 80% or less, more particularly about 76% or less, more particularly about 72% or less, depending on whether the stretch of two or more mismatching nucleotides encompasses 2, 3, 4, 5, 6 or 7 nucleotides, etc. In one embodiment, aside from the stretch of one or more mismatching nucleotides, the degree of complementarity, when optimally aligned using a suitable alignment algorithm, is about or more than about 50%, 60%, 75%, 80%, 85%, 90%, 95%, 97.5%, 99%, or more. Optimal alignment may be determined with the use of any suitable algorithm for aligning sequences, non-limiting example of which include the Smith-Waterman algorithm, the Needleman-Wunsch algorithm, algorithms based on the Burrows-Wheeler Transform (e.g., the Burrows Wheeler Aligner), ClustalW, Clustal X, BLAT, Novoalign (Novocraft Technologies; available at www.novocraft.com), ELAND (Illumina, San Diego, CA), SOAP (available at soap.genomics.org.cn), and Maq (available at maq.sourceforge.net). The ability of a CRISPR-associated guide sequence (within a nucleic acid-targeting guide RNA) to direct sequence-specific binding of a nucleic acid-targeting complex to a target nucleic acid sequence may be assessed by any suitable assay. For example, the components of a nucleic acid-guided nuclease-guide system sufficient to form a nucleic acid-targeting complex, including the CRISPR-associated guide sequence to be tested, may be provided to a host cell having the corresponding target nucleic acid sequence, such as by transfection with vectors encoding the components of the nucleic acid-targeting complex, followed by an assessment of preferential targeting (e.g., cleavage) within the target nucleic acid sequence, such as by Surveyor assay as described herein. Similarly, cleavage of a target nucleic acid sequence (or a sequence in the vicinity thereof) may be evaluated in a test tube by providing the target nucleic acid sequence, components of a nucleic acid-targeting complex, including the CRISPR-associated guide sequence to be tested and a control guide sequence different from the test CRISPR-associated guide sequence, and comparing binding or rate of cleavage at or in the vicinity of the target sequence between the test CRISPR-associated and control guide sequence reactions. Other assays are possible, and will occur to those skilled in the art. A CRISPR-associated guide sequence, and hence a nucleic acid-targeting guide RNA may be selected to target any target nucleic acid sequence.

[0296] A CRISPR-associated guide sequence, and hence a nucleic acid-targeting guide, may be selected to target any target nucleic acid sequence. The target sequence may be DNA. The target sequence may be any RNA sequence. In one embodiment, the target sequence may be a sequence within a RNA molecule selected from the group consisting of messenger RNA (mRNA), pre-mRNA, ribosomal RNA (rRNA), transfer RNA (tRNA), micro-RNA (miRNA), small interfering RNA (siRNA), small nuclear RNA (snRNA), small nucleolar RNA (snoRNA), double stranded RNA (dsRNA), non-coding RNA (ncRNA), long non-coding RNA (lncRNA), and small cytoplasmatic RNA (scRNA). In some preferred embodiments, the target sequence may be a sequence within a RNA molecule selected from the group consisting of mRNA, pre-mRNA, and rRNA. In some preferred embodiments, the target sequence may be a sequence within a RNA molecule selected from the group consisting of ncRNA, and lncRNA. In some more preferred embodiments, the target sequence may be a sequence within an mRNA molecule or a pre-mRNA molecule.

[0297] In an embodiment, the CRISPR-associated guide sequence or spacer length of the CRISPR-associated guide molecules is from 15 to 50 nt. In an embodiment, the spacer length of the CRISPR-associated guide RNA is at least 15 nucleotides. In an embodiment, the spacer length is from 15 to 17 nt, e.g., 15, 16, or 17 nt, from 17 to 20 nt, e.g., 17, 18, 19, or 20 nt, from 20 to 24 nt, e.g., 20, 21, 22, 23, or 24 nt, from 23 to 25 nt, e.g., 23, 24, or 25 nt, from 24 to 27 nt, e.g., 24, 25, 26, or 27 nt, from 27 to 30 nt, e.g., 27, 28, 29, or 30 nt, from 30 to 35 nt, e.g., 30, 31, 32, 33, 34, or 35 nt, or 35 nt or longer. In certain example embodiment, the CRISPR-associated guide sequence is 15, 16, 17, 18, 19, 20, 21, 22, 23, 24, 25, 26, 27, 28, 29, 30, 31, 32, 33, 34, 35, 36, 37, 38, 39 40, 41, 42, 43, 44, 45, 46, 47 48, 49, 50, 51, 52, 53, 54, 55, 56, 57, 58, 59, 60, 61, 62, 63, 64, 65, 66, 67, 68, 69, 70, 71, 72, 73, 74, 75, 76, 77, 78, 79, 80, 81, 82, 83, 84, 85, 86, 87, 88, 89, 90, 91, 92, 93, 94, 95, 96, 97, 98, 99, or 100 nt.

[0298] In one embodiment, the sequence of the CRISPR-associated guide molecule (direct repeat and/or spacer) is selected to reduce the degree secondary structure within the guide molecule. In one embodiment, about or less than about 75%, 50%, 40%, 30%, 25%, 20%, 15%, 10%, 5%, 1%, or fewer of the nucleotides of the nucleic acid-targeting guide RNA participate in self-complementary base pairing when optimally folded. Optimal folding may be determined by any suitable polynucleotide folding algorithm. Some programs are based on calculating the minimal Gibbs free energy. An example of one such algorithm is mFold, as described by Zuker and Stiegler (Nucleic Acids Res. 9 (1981), 133-148). Another example of a folding algorithm is the online webserver RNAfold, developed at Institute for Theoretical Chemistry at the University of Vienna, using the centroid structure prediction algorithm (see e.g., A. R. Gruber et al., 2008, Cell 106(1): 23-24; and PA Carr and GM Church, 2009, Nature Biotechnology 27(12): 1151-62). Further algorithms may be found in U.S. application Ser. No. ______ (attorney docket 44790.11.2022; Broad Reference BI-2013/004A); incorporated herein by reference.

[0299] In a particular embodiment, the CRISPR-associated guide molecule comprises a guide sequence linked to a direct repeat sequence, wherein the direct repeat sequence comprises one or more stem loops or optimized secondary structures. In one embodiment, the direct repeat has a minimum length of 16 nts and a single stem loop. In further embodiments the direct repeat has a length longer than 16 nts, preferably more than 17 nts, and has more than one stem loops or optimized secondary structures. In one embodiment, the CRISPR-associated guide molecule comprises or consists of the guide sequence linked to all or part of the natural direct repeat sequence. In one embodiment, certain aspects of the CRISPR-associated guide architecture can be modified, for example by addition, subtraction, or substitution of features, whereas certain other aspects of CRISPR-associated guide architecture are maintained. Preferred locations for engineered CRISPR-associated guide molecule modifications, including but not limited to insertions, deletions, and substitutions include CRISPR-associated guide termini and regions of the CRISPR-associated guide molecule that are exposed when complexed with nucleic acid-guided nuclease and/or target, for example the tetraloop and/or loop2.

[0300] In one embodiment, a loop in the CRISPR-associated guide RNA is provided. This may be a stem loop or a tetra loop. The loop is preferably GAAA, but it is not limited to this sequence or indeed to being only 4 bp in length. Indeed, preferred loop forming sequences for use in hairpin structures are four nucleotides in length, and most preferably have the sequence GAAA. However, longer or shorter loop sequences may be used, as may alternative sequences. The sequences preferably include a nucleotide triplet (for example, AAA), and an additional nucleotide (for example C or G). Examples of loop forming sequences include CAAA and AAAG.

[0301] In one embodiment, the CRISPR-associated guide molecule forms a stemloop with a separate non-covalently linked sequence, which can be DNA or RNA. In one embodiment, the sequences forming the CRISPR-associated guide are first synthesized using the standard phosphoramidite synthetic protocol (Herdewijn, P., ed., Methods in Molecular Biology Col 288, Oligonucleotide Synthesis: Methods and Applications, Humana Press, New Jersey (2012)). In one embodiment, these sequences can be functionalized to contain an appropriate functional group for ligation using the standard protocol known in the art (Hermanson, G. T., Bioconjugate Techniques, Academic Press (2013)). Examples of functional groups include, but are not limited to, hydroxyl, amine, carboxylic acid, carboxylic acid halide, carboxylic acid active ester, aldehyde, carbonyl, chlorocarbonyl, imidazolylcarbonyl, hydrozide, semicarbazide, thio semicarbazide, thiol, maleimide, haloalkyl, sufonyl, ally, propargyl, diene, alkyne, and azide. Once this sequence is functionalized, a covalent chemical bond or linkage can be formed between this sequence and the direct repeat sequence. Examples of chemical bonds include, but are not limited to, those based on carbamates, ethers, esters, amides, imines, amidines, aminotrizines, hydrozone, disulfides, thioethers, thioesters, phosphorothioates, phosphorodithioates, sulfonamides, sulfonates, fulfones, sulfoxides, ureas, thioureas, hydrazide, oxime, triazole, photolabile linkages, C—C bond forming groups such as Diels-Alder cyclo-addition pairs or ring-closing metathesis pairs, and Michael reaction pairs.

[0302] In one embodiment, these stem-loop forming sequences can be chemically synthesized. In one embodiment, the chemical synthesis uses automated, solid-phase oligonucleotide synthesis machines with 2′-acetoxyethyl orthoester (2′-ACE) (Scaringe et al., J. Am. Chem. Soc. (1998) 120: 11820-11821; Scaringe, Methods Enzymol. (2000) 317: 3-18) or 2′-thionocarbamate (2′-TC) chemistry (Dellinger et al., J. Am. Chem. Soc. (2011) 133: 11540-11546; Hendel et al., Nat. Biotechnol. (2015) 33:985-989).

[0303] The repeat:anti repeat duplex will be apparent from the secondary structure of the sgRNA. It may be typically a first complimentary stretch after (in 5′ to 3′ direction) the poly U tract and before the tetraloop; and a second complimentary stretch after (in 5′ to 3′ direction) the tetraloop and before the poly A tract. The first complimentary stretch (the “repeat”) is complimentary to the second complimentary stretch (the “anti-repeat”). As such, they Watson-Crick base pair to form a duplex of dsRNA when folded back on one another. As such, the anti-repeat sequence is the complimentary sequence of the repeat and in terms to A-U or C-G base pairing, but also in terms of the fact that the anti-repeat is in the reverse orientation due to the tetraloop.

[0304] In an embodiment of the invention, modification of CRISPR-associated guide architecture comprises replacing bases in stemloop 2. For example, In one embodiment, “actt” (“acuu” in RNA) and “aagt” (“aagu” in RNA) bases in stemloop2 are replaced with “cgcc” and “gcgg”. In one embodiment, “actt” and “aagt” bases in stemloop2 are replaced with complimentary GC-rich regions of 4 nucleotides. In one embodiment, the complimentary GC-rich regions of 4 nucleotides are “cgcc” and “gcgg” (both in 5′ to 3′ direction). In one embodiment, the complimentary GC-rich regions of 4 nucleotides are “gcgg” and “cgcc” (both in 5′ to 3′ direction). Other combination of C and G in the complimentary GC-rich regions of 4 nucleotides will be apparent including CCCC and GGGG.

[0305] In one aspect, the stemloop 2, e.g., “ACTTgtttAAGT” can be replaced by any “XXXXgtttYYYY”, e.g., where XXXX and YYYY represent any complementary sets of nucleotides that together will base pair to each other to create a stem.

[0306] In one aspect, the stem comprises at least about 4 bp comprising complementary X and Y sequences, although stems of more, e.g., 5, 6, 7, 8, 9, 10, 11 or 12 or fewer, e.g., 3, 2, base pairs are also contemplated. Thus, for example X2-12 and Y2-12 (wherein X and Y represent any complementary set of nucleotides) may be contemplated. In one aspect, the stem made of the X and Y nucleotides, together with the “gttt,” will form a complete hairpin in the overall secondary structure; and, this may be advantageous and the amount of base pairs can be any amount that forms a complete hairpin. In one aspect, any complementary X:Y basepairing sequence (e.g., as to length) is tolerated, so long as the secondary structure of the entire CRISPR-associated sgRNA is preserved. In one aspect, the stem can be a form of X:Y basepairing that does not disrupt the secondary structure of the whole CRISPR-associated sgRNA in that it has a DR:tracr duplex, and 3 stemloops. In one aspect, the “gttt” tetraloop that connects ACTT and AAGT (or any alternative stem made of X:Y basepairs) can be any sequence of the same length (e.g., 4 basepair) or longer that does not interrupt the overall secondary structure of the sgRNA. In one aspect, the stemloop can be something that further lengthens stemloop2, e.g. can be MS2 aptamer. In one aspect, the stemloop3 “GGCACCGagtCGGTGC” can likewise take on a “XXXXXXXagtYYYYYYY” form, e.g., wherein X7 and Y7 represent any complementary sets of nucleotides that together will base pair to each other to create a stem. In one aspect, the stem comprises about 7 bp comprising complementary X and Y sequences, although stems of more or fewer basepairs are also contemplated. In one aspect, the stem made of the X and Y nucleotides, together with the “agt”, will form a complete hairpin in the overall secondary structure. In one aspect, any complementary X:Y basepairing sequence is tolerated, so long as the secondary structure of the entire sgRNA is preserved. In one aspect, the stem can be a form of X:Y basepairing that doesn't disrupt the secondary structure of the whole sgRNA in that it has a DR:tracr duplex, and 3 stemloops. In one aspect, the “agt” sequence of the stemloop 3 can be extended or be replaced by an aptamer, e.g., a MS2 aptamer or sequence that otherwise generally preserves the architecture of stemloop3. In one aspect for alternative Stemloops 2 and/or 3, each X and Y pair can refer to any basepair. In one aspect, non-Watson Crick basepairing is contemplated, where such pairing otherwise generally preserves the architecture of the stemloop at that position.

[0307] In one aspect, the DR:tracrRNA duplex can be replaced with the form: gYYYYag(N)NNNNxxxxNNNN(AAN)uuRRRRu (using standard IUPAC nomenclature for nucleotides), wherein (N) and (AAN) represent part of the bulge in the duplex, and “xxxx” represents a linker sequence. NNNN on the direct repeat can be anything so long as it basepairs with the corresponding NNNN portion of the tracrRNA. In one aspect, the DR:tracrRNA duplex can be connected by a linker of any length, any base composition, as long as it doesn't alter the overall structure.

[0308] In one embodiment, the natural hairpin or stemloop structure of the CRISPR-associated guide molecule is extended or replaced by an extended stemloop. Extension of the stem can enhance the assembly of the CRISPR-associated guide molecule with the nucleic acid-guided nuclease. In one embodiment the stem of the stemloop is extended by at least 1, 2, 3, 4, 5 or more complementary basepairs (i.e. corresponding to the addition of 2, 4, 6, 8, 10 or more nucleotides in the CRISPR-associated guide molecule). In one embodiment these are located at the end of the stem, adjacent to the loop of the stemloop.

[0309] In one embodiment, the susceptibility of the CRISPR-associated guide molecule to RNAses or to decreased expression can be reduced by slight modifications of the sequence of the CRISPR-associated guide molecule which do not affect its function. For instance, in one embodiment, premature termination of transcription, such as premature transcription of U6 Pol-III, can be removed by modifying a putative Pol-III terminator (4 consecutive U's) in the CRISPR-associated guide molecules sequence. Where such sequence modification is required in the stemloop of the CRISPR-associated guide molecule, it is preferably ensured by a basepair flip.

[0310] In an embodiment, the CRISPR-associated guide molecule comprises non-naturally occurring nucleic acids and/or non-naturally occurring nucleotides and/or nucleotide analogs, and/or chemically modifications. Preferably, these non-naturally occurring nucleic acids and non-naturally occurring nucleotides are located outside the CRISPR-associated guide sequence. Non-naturally occurring nucleic acids can include, for example, mixtures of naturally and non-naturally occurring nucleotides. Non-naturally occurring nucleotides and/or nucleotide analogs may be modified at the ribose, phosphate, and/or base moiety. In an embodiment of the invention, a CRISPR-associated guide nucleic acid comprises ribonucleotides and non-ribonucleotides. In one such embodiment, a CRISPR-associated guide comprises one or more ribonucleotides and one or more deoxyribonucleotides. In an embodiment of the invention, the CRISPR-associated guide comprises one or more non-naturally occurring nucleotide or nucleotide analog such as a nucleotide with phosphorothioate linkage, a locked nucleic acid (LNA) nucleotides comprising a methylene bridge between the 2′ and 4′ carbons of the ribose ring, or bridged nucleic acids (BNA). Other examples of modified nucleotides include 2′-O-methyl analogs, 2′-deoxy analogs, or 2′-fluoro analogs. Further examples of modified bases include, but are not limited to, 2-aminopurine, 5-bromo-uridine, pseudouridine, inosine, 7-methylguanosine. Examples of guide RNA chemical modifications include, without limitation, incorporation of 2′-O-methyl (M), 2′-O-methyl 3′phosphorothioate (MS), S-constrained ethyl(cEt), or 2′-O-methyl 3′thioPACE (MSP) at one or more terminal nucleotides. Such chemically modified CRISPR-associated guides can comprise increased stability and increased activity as compared to unmodified CRISPR-associated guides, though on-target vs. off-target specificity is not predictable. (See, Hendel, 2015, Nat Biotechnol. 33(9):985-9, doi: 10.1038/nbt.3290, published online 29 Jun. 2015 Ragdarm et al., 0215, PNAS, E7110-E7111; Allerson et al., J. Med. Chem. 2005, 48:901-904; Bramsen et al., Front. Genet., 2012, 3:154; Deng et al., PNAS, 2015, 112:11870-11875; Sharma et al., MedChemComm., 2014, 5:1454-1471; Hendel et al., Nat. Biotechnol. (2015)33(9): 985-989; Li et al., Nature Biomedical Engineering, 2017, 1, 0066 DOI:10.1038/s41551-017-0066). In one embodiment, the 5′ and/or 3′ end of a CRISPR-associated guide RNA is modified by a variety of functional moieties including fluorescent dyes, polyethylene glycol, cholesterol, proteins, or detection tags. (See Kelly et al., 2016, J. Biotech. 233:74-83). In an embodiment, a CRISPR-associated guide comprises ribonucleotides in a region that binds to a target sequence and one or more deoxyribonucletides and/or nucleotide analogs in a region that binds to the nucleic acid-guided nuclease. In an embodiment, deoxyribonucleotides and/or nucleotide analogs are incorporated in engineered guide structures, such as, without limitation, stem-loop regions, and the seed region. In one embodiment, 3-5 nucleotides at either the 3′ or the 5′ end of a guide is chemically modified. In one embodiment, only minor modifications are introduced in the seed region, such as 2′-F modifications. In one embodiment, 2′-F modification is introduced at the 3′ end of a guide. In an embodiment, three to five nucleotides at the 5′ and/or the 3′ end of the CRISPR-associated guide are chemically modified with 2′-O-methyl (M), 2′-O-methyl 3′ phosphorothioate (MS), S-constrained ethyl(cEt), or 2′-O-methyl 3′ thioPACE (MSP). Such modification can enhance genome editing efficiency (see Hendel et al., Nat. Biotechnol. (2015) 33(9): 985-989). In an embodiment, all of the phosphodiester bonds of a CRISPR-associated guide are substituted with phosphorothioates (PS) for enhancing levels of gene disruption. In an embodiment, more than five nucleotides at the 5′ and/or the 3′ end of the CRISPR-associated guide are chemically modified with 2′-O-Me, 2′-F or S-constrained ethyl(cEt). Such chemically modified CRISPR-associated guide can mediate enhanced levels of gene disruption (see Ragdarm et al., 0215, PNAS, E7110-E7111). In an embodiment of the invention, a CRISPR-associated guide is modified to comprise a chemical moiety at its 3′ and/or 5′ end. Such moieties include, but are not limited to amine, azide, alkyne, thio, dibenzocyclooctyne (DBCO), or Rhodamine. In certain embodiment, the chemical moiety is conjugated to the CRISPR-associated guide by a linker, such as an alkyl chain. In an embodiment, the chemical moiety of the modified CRISPR-associated guide can be used to attach the CRISPR-associated guide to another molecule, such as DNA, RNA, protein, or nanoparticles. Such chemically modified CRISPR-associated guide can be used to identify or enrich cells generically edited by a nucleic acid-guided nuclease and related systems (see Lee et al., eLife, 2017, 6:e25312, DOI:10.7554).

[0311] In a particular embodiment, the direct repeat may be modified to comprise one or more protein-binding RNA aptamers. In a particular embodiment, one or more aptamers may be included such as part of optimized secondary structure. Such aptamers may be capable of binding a bacteriophage coat protein as detailed further herein.

[0312] In one embodiment, the nucleic acid-guided nuclease may need a tracr sequence. The “tracrRNA” sequence or analogous terms includes any polynucleotide sequence that has sufficient complementarity with a crRNA sequence to hybridize. In one embodiment, the degree of complementarity between the tracrRNA sequence and crRNA sequence along the length of the shorter of the two when optimally aligned is about or more than about 25%, 30%, 40%, 50%, 60%, 70%, 80%, 90%, 95%, 97.5%, 99%, or higher. In one embodiment, the tracr sequence is about or more than about 5, 6, 7, 8, 9, 10, 11, 12, 13, 14, 15, 16, 17, 18, 19, 20, 25, 30, 40, 50, or more nucleotides in length. In one embodiment, the tracr sequence and CRISPR-associated guide sequence are contained within a single transcript, such that hybridization between the two produces a transcript having a secondary structure, such as a hairpin. In an embodiment of the invention, the transcript or transcribed polynucleotide sequence has at least two or more hairpins. In preferred embodiments, the transcript has two, three, four or five hairpins. In a further embodiment of the invention, the transcript has at most five hairpins. In a hairpin structure the portion of the sequence 5′ of the final “N” and upstream of the loop may correspond to the tracr mate sequence, and the portion of the sequence 3′ of the loop then corresponds to the tracr sequence. In a hairpin structure the portion of the sequence 5′ of the final “N” and upstream of the loop may alternatively correspond to the tracr sequence, and the portion of the sequence 3′ of the loop corresponds to the tracr mate sequence.

[0313] In one embodiment, the tracr and tracr mate sequences can be chemically synthesized. In one embodiment, the chemical synthesis uses automated, solid-phase oligonucleotide synthesis machines with 2′-acetoxyethyl orthoester (2′-ACE) (Scaringe et al., J. Am. Chem. Soc. (1998) 120: 11820-11821; Scaringe, Methods Enzymol. (2000) 317: 3-18) or 2′-thionocarbamate (2′-TC) chemistry (Dellinger et al., J. Am. Chem. Soc. (2011) 133: 11540-11546; Hendel et al., Nat. Biotechnol. (2015) 33:985-989).

[0314] In one embodiment, the tracr and tracr mate sequences can be covalently linked using various bioconjugation reactions, loops, bridges, and non-nucleotide links via modifications of sugar, internucleotide phosphodiester bonds, purine and pyrimidine residues. Sletten et al., Angew. Chem. Int. Ed. (2009) 48:6974-6998; Manoharan, M. Curr. Opin. Chem. Biol. (2004) 8: 570-9; Behlke et al., Oligonucleotides (2008) 18: 305-19; Watts, et al., Drug. Discov. Today (2008) 13: 842-55; Shukla, et al., ChemMedChem (2010) 5: 328-49.

[0315] In one embodiment, the tracr and tracr mate sequences can be covalently linked using click chemistry. In one embodiment, the tracr and tracr mate sequences can be covalently linked using a triazole linker. In one embodiment, the tracr and tracr mate sequences can be covalently linked using Huisgen 1,3-dipolar cycloaddition reaction involving an alkyne and azide to yield a highly stable triazole linker (He et al., ChemBioChem (2015) 17: 1809-1812; WO 2016/186745). In one embodiment, the tracr and tracr mate sequences are covalently linked by ligating a 5′-hexyne tracrRNA and a 3′-azide crRNA. In one embodiment, either or both of the 5′-hexyne tracrRNA and a 3′-azide crRNA can be protected with 2′-acetoxyethl orthoester (2′-ACE) group, which can be subsequently removed using Dharmacon protocol (Scaringe et al., J. Am. Chem. Soc. (1998) 120: 11820-11821; Scaringe, Methods Enzymol. (2000) 317: 3-18).

[0316] In one embodiment, the tracr and tracr mate sequences can be covalently linked via a linker (e.g., a non-nucleotide loop) that comprises a moiety such as spacers, attachments, bioconjugates, chromophores, reporter groups, dye labeled RNAs, and non-naturally occurring nucleotide analogues. More specifically, suitable spacers for purposes of this invention include, but are not limited to, polyethers (e.g., polyethylene glycols, polyalcohols, polypropylene glycol or mixtures of efhylene and propylene glycols), polyamines group (e.g., spennine, spermidine and polymeric derivatives thereof), polyesters (e.g., poly(ethyl acrylate)), polyphosphodiesters, alkylenes, and combinations thereof. Suitable attachments include any moiety that can be added to the linker to add additional properties to the linker, such as but not limited to, fluorescent labels. Suitable bioconjugates include, but are not limited to, peptides, glycosides, lipids, cholesterol, phospholipids, diacyl glycerols and dialkyl glycerols, fatty acids, hydrocarbons, enzyme substrates, steroids, biotin, digoxigenin, carbohydrates, polysaccharides. Suitable chromophores, reporter groups, and dye-labeled RNAs include, but are not limited to, fluorescent dyes such as fluorescein and rhodamine, chemiluminescent, electrochemiluminescent, and bioluminescent marker compounds. The design of example linkers conjugating two RNA components are also described in WO 2004/015075.

[0317] The linker (e.g., a non-nucleotide loop) can be of any length. In one embodiment, the linker has a length equivalent to about 0-16 nucleotides. In one embodiment, the linker has a length equivalent to about 0-8 nucleotides. In one embodiment, the linker has a length equivalent to about 0-4 nucleotides. In one embodiment, the linker has a length equivalent to about 2 nucleotides. Example linker design is also described in International Patent Publication No. WO 2011/008730.

[0318] In an embodiment, the nucleic acid-guided nuclease uses of a tracrRNA, the CRISPR-associated guide sequence, tracr mate, and tracr sequence may reside in a single RNA, i.e. an sgRNA (arranged in a 5′ to 3′ orientation or alternatively arranged in a 3′ to 5′ orientation), or the tracr RNA may be a different RNA than the RNA containing the CRISPR-associated guide and tracr mate sequence. In these embodiments, the tracr hybridizes to the tracr mate sequence and directs the nucleic acid-guided nuclease-guide molecule complex to the target sequence. In some examples, a CRISPR-associated sgRNA comprises (in 5′ to 3′ direction): a CRISPR-associated guide sequence, a poly U tract, a first complimentary stretch (the “repeat”), a loop (tetraloop), a second complimentary stretch (the “anti-repeat” being complimentary to the repeat), a stem, and further stem loops and stems and a poly A (often poly U in RNA) tail (terminator). In preferred embodiments, certain aspects of CRISPR-associated guide architecture are retained, certain aspect of CRISPR-associated guide architecture cam be modified, for example by addition, subtraction, or substitution of features, whereas certain other aspects of CRISPR-associated guide architecture are maintained. Preferred locations for engineered CRISPR-associated sgRNA modifications, including but not limited to insertions, deletions, and substitutions include CRISPR-associated guide termini and regions of the CRISPR-associated sgRNA that are exposed when complexed with nucleic acid-guided nuclease and/or target, for example the tetraloop and/or loop2.

[0319] In one embodiment, the CRISPR-associated guide molecule comprises, in addition the CRISPR-associated guide sequence, a sequence corresponding to a direct repeat in the CRISPR locus. In one embodiment, this sequence comprises at least one hairpin, i.e., a region of self-complementarity. In one embodiment, the CRISPR-associated guide sequence is 3′ of the direct repeat comprising at least one hairpin. In further embodiments, the CRISPR-associated guide sequence is 5′ of the direct repeat comprising at least one hairpin. In one embodiment, a hairpin is located in the middle of the CRISPR-associated guide sequence, i.e. the CRISPR-associated guide sequence is in part 5′ and in part 3′ of the direct repeat. The hairpin in the middle of the CRISPR-associated guide sequence may be involved in recognition or processing of the guide molecule. In one embodiment, the hairpin structure comprises at least 5, preferably 7-20 nucleotides.

### Escorted Guides

[0320] In one embodiment, the compositions or complexes have a CRISPR-associated guide molecule with a functional structure designed to improve CRISPR-associated guide molecule structure, architecture, stability, genetic expression, or any combination thereof. Such a structure can include an aptamer.

[0321] Aptamers are biomolecules that can be designed or selected to bind tightly to other ligands, for example using a technique called systematic evolution of ligands by exponential enrichment (SELEX; Tuerk C, Gold L: “Systematic evolution of ligands by exponential enrichment: RNA ligands to bacteriophage T4 DNA polymerase.” Science 1990, 249:505-510). Nucleic acid aptamers can for example be selected from pools of random-sequence oligonucleotides, with high binding affinities and specificities for a wide range of biomedically relevant targets, suggesting a wide range of therapeutic utilities for aptamers (Keefe, Anthony D., Supriya Pai, and Andrew Ellington. “Aptamers as therapeutics.” Nature Reviews Drug Discovery 9.7 (2010): 537-550). These characteristics also suggest a wide range of uses for aptamers as drug delivery vehicles (Levy-Nissenbaum, Etgar, et al. “Nanotechnology and aptamers: applications in drug delivery.” Trends in biotechnology 26.8 (2008): 442-449; and, Hicke B J, Stephens A W. “Escort aptamers: a delivery service for diagnosis and therapy.” J Clin Invest 2000, 106:923-928.). Aptamers may also be constructed that function as molecular switches, responding to a que by changing properties, such as RNA aptamers that bind fluorophores to mimic the activity of green fluorescent protein (Paige, Jeremy S., Karen Y. Wu, and Samie R. Jaffrey. “RNA mimics of green fluorescent protein.” Science 333.6042 (2011): 642-646). It has also been suggested that aptamers may be used as components of targeted siRNA therapeutic delivery systems, for example targeting cell surface proteins (Zhou, Jiehua, and John J. Rossi. “Aptamer-targeted cell-specific RNA interference.” Silence 1.1 (2010): 4).

[0322] Accordingly, in one embodiment, the CRISPR-associated guide molecule is modified, e.g., by one or more aptamer(s) designed to improve CRISPR-associated guide molecule delivery, including delivery across the cellular membrane, to intracellular compartments, or into the nucleus. Such a structure can include, either in addition to the one or more aptamer(s) or without such one or more aptamer(s), moiety(ies) so as to render the CRISPR-associated guide molecule deliverable, inducible or responsive to a selected effector. The invention accordingly comprehends a CRISPR-associated guide molecule that responds to normal or pathological physiological conditions, including without limitation pH, hypoxia, 02 concentration, temperature, protein concentration, enzymatic concentration, lipid structure, light exposure, mechanical disruption (e.g. ultrasound waves), magnetic fields, electric fields, or electromagnetic radiation.

[0323] Light responsiveness of an inducible system may be achieved via the activation and binding of cryptochrome-2 and CIB1. Blue light stimulation induces an activating conformational change in cryptochrome-2, resulting in recruitment of its binding partner CIB1. This binding is fast and reversible, achieving saturation in <15 sec following pulsed stimulation and returning to baseline <15 min after the end of stimulation. These rapid binding kinetics result in a system temporally bound only by the speed of transcription/translation and transcript/protein degradation, rather than uptake and clearance of inducing agents. Crytochrome-2 activation is also highly sensitive, allowing for the use of low light intensity stimulation and mitigating the risks of phototoxicity. Further, in a context such as the intact mammalian brain, variable light intensity may be used to control the size of a stimulated region, allowing for greater precision than vector delivery alone may offer.

[0324] Energy sources such as electromagnetic radiation, sound energy or thermal energy may induce the CRISPR-associated guide. Advantageously, the electromagnetic radiation is a component of visible light. In a preferred embodiment, the light is a blue light with a wavelength of about 450 to about 495 nm. In an especially preferred embodiment, the wavelength is about 488 nm. In another preferred embodiment, the light stimulation is via pulses. The light power may range from about 0-9 mW/cm2. In a preferred embodiment, a stimulation paradigm of as low as 0.25 sec every 15 sec should result in maximal activation.

[0325] The chemical or energy sensitive CRISPR-associated guide may undergo a conformational change upon induction by the binding of a chemical source or by the energy allowing it act as a CRISPR-associated guide and have the nucleic acid-guided nuclease system or complex function. The invention can involve applying the chemical source or energy so as to have the CRISPR-associated guide function and the nucleic acid-guided nuclease system or complex function; and optionally further determining that the expression of the genomic locus is altered.

[0326] There are several different designs of this chemical inducible system: 1. ABI-PYL based system inducible by Abscisic Acid (ABA) (see, e.g., stke.sciencemag.org/cgi/content/abstract/sigtrans; 4/164/rs2), 2. FKBP-FRB based system inducible by rapamycin (or related chemicals based on rapamycin) (see, e.g., www.nature.com/nmeth/journal/v2/n6/full/nmeth763.html), 3. GID1-GAI based system inducible by Gibberellin (GA) (see, e.g., www.nature.com/nchembio/journal/v8/n5/full/nchembio.922.html).

[0327] A chemical inducible system can be an estrogen receptor (ER) based system inducible by 4-hydroxytamoxifen (4OHT) (see, e.g., www.pnas.org/content/104/3/1027.abstract). A mutated ligand-binding domain of the estrogen receptor called ERT2 translocates into the nucleus of cells upon binding of 4-hydroxytamoxifen. In further embodiments of the invention any naturally occurring or engineered derivative of any nuclear receptor, thyroid hormone receptor, retinoic acid receptor, estrogen receptor, estrogen-related receptor, glucocorticoid receptor, progesterone receptor, androgen receptor may be used in inducible systems analogous to the ER based inducible system.

[0328] Another inducible system is based on the design using Transient receptor potential (TRP) ion channel-based system inducible by energy, heat or radio-wave (see, e.g., www.sciencemag.org/content/336/6081/604). These TRP family proteins respond to different stimuli, including light and heat. When this protein is activated by light or heat, the ion channel will open and allow the entering of ions such as calcium into the plasma membrane. This influx of ions will bind to intracellular ion interacting partners linked to a polypeptide including the guide and the other components of the nucleic acid-guided nuclease/CRISPR-associated guide molecule complex or system, and the binding will induce the change of sub-cellular localization of the polypeptide, leading to the entire polypeptide entering the nucleus of cells. Once inside the nucleus, the guide protein and the other components of the nucleic acid-guided nuclease/CRISPR-associated guide molecule complex will be active and modulating target gene expression in cells.

[0329] While light activation may be an advantageous embodiment, sometimes it may be disadvantageous especially for in vivo applications in which the light may not penetrate the skin or other organs. In this instance, other methods of energy activation are contemplated, in particular, electric field energy and/or ultrasound which have a similar effect.

[0330] Electric field energy is preferably administered substantially as described in the art, using one or more electric pulses of from about 1 Volt/cm to about 10 kVolts/cm under in vivo conditions. Instead of or in addition to the pulses, the electric field may be delivered in a continuous manner. The electric pulse may be applied for between 1 μs and 500 milliseconds, preferably between 1 μs and 100 milliseconds. The electric field may be applied continuously or in a pulsed manner for 5 about minutes.

[0331] As used herein, ‘electric field energy’ is the electrical energy to which a cell is exposed. Preferably the electric field has a strength of from about 1 Volt/cm to about 10 kVolts/cm or more under in vivo conditions (see WO97/49450).

[0332] As used herein, the term “electric field” includes one or more pulses at variable capacitance and voltage and including exponential and/or square wave and/or modulated wave and/or modulated square wave forms. References to electric fields and electricity should be taken to include reference the presence of an electric potential difference in the environment of a cell. Such an environment may be set up by way of static electricity, alternating current (AC), direct current (DC), etc., as known in the art. The electric field may be uniform, non-uniform or otherwise, and may vary in strength and/or direction in a time dependent manner.

[0333] Single or multiple applications of electric field, as well as single or multiple applications of ultrasound are also possible, in any order and in any combination. The ultrasound and/or the electric field may be delivered as single or multiple continuous applications, or as pulses (pulsatile delivery).

[0334] Electroporation has been used in both in vitro and in vivo procedures to introduce foreign material into living cells. With in vitro applications, a sample of live cells is first mixed with the agent of interest and placed between electrodes such as parallel plates. Then, the electrodes apply an electrical field to the cell/implant mixture. Examples of systems that perform in vitro electroporation include the Electro Cell Manipulator ECM600 product, and the Electro Square Porator T820, both made by the BTX Division of Genetronics, Inc (see U.S. Pat. No. 5,869,326).

[0335] The known electroporation techniques (both in vitro and in vivo) function by applying a brief high voltage pulse to electrodes positioned around the treatment region. The electric field generated between the electrodes causes the cell membranes to temporarily become porous, whereupon molecules of the agent of interest enter the cells. In known electroporation applications, this electric field comprises a single square wave pulse on the order of 1000 V/cm, of about 100 .mu.s duration. Such a pulse may be generated, for example, in known applications of the Electro Square Porator T820.

[0336] Preferably, the electric field has a strength of from about 1 V/cm to about 10 kV/cm under in vitro conditions. Thus, the electric field may have a strength of 1 V/cm, 2 V/cm, 3 V/cm, 4 V/cm, 5 V/cm, 6 V/cm, 7 V/cm, 8 V/cm, 9 V/cm, 10 V/cm, 20 V/cm, 50 V/cm, 100 V/cm, 200 V/cm, 300 V/cm, 400 V/cm, 500 V/cm, 600 V/cm, 700 V/cm, 800 V/cm, 900 V/cm, 1 kV/cm, 2 kV/cm, 5 kV/cm, 10 kV/cm, 20 kV/cm, 50 kV/cm or more. More preferably from about 0.5 kV/cm to about 4.0 kV/cm under in vitro conditions. Preferably the electric field has a strength of from about 1 V/cm to about 10 kV/cm under in vivo conditions. However, the electric field strengths may be lowered where the number of pulses delivered to the target site are increased. Thus, pulsatile delivery of electric fields at lower field strengths is envisaged.

[0337] Preferably, the application of the electric field is in the form of multiple pulses such as double pulses of the same strength and capacitance or sequential pulses of varying strength and/or capacitance. As used herein, the term “pulse” includes one or more electric pulses at variable capacitance and voltage and including exponential and/or square wave and/or modulated wave/square wave forms.

[0338] Preferably, the electric pulse is delivered as a waveform selected from an exponential wave form, a square wave form, a modulated wave form and a modulated square wave form.

[0339] A preferred embodiment employs direct current at low voltage. Thus, Applicants disclose the use of an electric field which is applied to the cell, tissue or tissue mass at a field strength of between 1V/cm and 20V/cm, for a period of 100 milliseconds or more, preferably 15 minutes or more.

[0340] Ultrasound is advantageously administered at a power level of from about 0.05 W/cm2 to about 100 W/cm2. Diagnostic or therapeutic ultrasound may be used, or combinations thereof.

[0341] As used herein, the term “ultrasound” refers to a form of energy which consists of mechanical vibrations the frequencies of which are so high they are above the range of human hearing. Lower frequency limit of the ultrasonic spectrum may generally be taken as about 20 kHz. Most diagnostic applications of ultrasound employ frequencies in the range 1 and 15 MHz′ (From Ultrasonics in Clinical Diagnosis, P. N. T. Wells, ed., 2nd. Edition, Publ. Churchill Livingstone [Edinburgh, London & NY, 1977]).

[0342] Ultrasound has been used in both diagnostic and therapeutic applications. When used as a diagnostic tool (“diagnostic ultrasound”), ultrasound is typically used in an energy density range of up to about 100 mW/cm2 (FDA recommendation), although energy densities of up to 750 mW/cm2 have been used. In physiotherapy, ultrasound is typically used as an energy source in a range up to about 3 to 4 W/cm2 (WHO recommendation). In other therapeutic applications, higher intensities of ultrasound may be employed, for example, HIFU at 100 W/cm up to 1 kW/cm2 (or even higher) for short periods of time. The term “ultrasound” as used in this specification is intended to encompass diagnostic, therapeutic and focused ultrasound.

[0343] Focused ultrasound (FUS) allows thermal energy to be delivered without an invasive probe (see Morocz et al 1998 Journal of Magnetic Resonance Imaging Vol. 8, No. 1, pp. 136-142. Another form of focused ultrasound is high intensity focused ultrasound (HIFU) which is reviewed by Moussatov et al in Ultrasonics (1998) Vol. 36, No. 8, pp. 893-900 and TranHuuHue et al in Acustica (1997) Vol. 83, No. 6, pp. 1103-1106.

[0344] Preferably, a combination of diagnostic ultrasound and a therapeutic ultrasound is employed. This combination is not intended to be limiting, however, and the skilled reader will appreciate that any variety of combinations of ultrasound may be used. Additionally, the energy density, frequency of ultrasound, and period of exposure may be varied.

[0345] Preferably, the exposure to an ultrasound energy source is at a power density of from about 0.05 to about 100 Wcm-2. Even more preferably, the exposure to an ultrasound energy source is at a power density of from about 1 to about 15 Wcm-2.

[0346] Preferably, the exposure to an ultrasound energy source is at a frequency of from about 0.015 to about 10.0 MHz. More preferably the exposure to an ultrasound energy source is at a frequency of from about 0.02 to about 5.0 MHz or about 6.0 MHz. Most preferably, the ultrasound is applied at a frequency of 3 MHz.

[0347] Preferably the exposure is for periods of from about 10 milliseconds to about 60 minutes. Preferably the exposure is for periods of from about 1 second to about 5 minutes. More preferably, the ultrasound is applied for about 2 minutes. Depending on the particular target cell to be disrupted, however, the exposure may be for a longer duration, for example, for 15 minutes.

[0348] Advantageously, the target tissue is exposed to an ultrasound energy source at an acoustic power density of from about 0.05 Wcm-2 to about 10 Wcm-2 with a frequency ranging from about 0.015 to about 10 MHz (see WO 98/52609). However, alternatives are also possible, for example, exposure to an ultrasound energy source at an acoustic power density of above 100 Wcm-2, but for reduced periods of time, for example, 1000 Wcm-2 for periods in the millisecond range or less.

[0349] Preferably, the application of the ultrasound is in the form of multiple pulses; thus, both continuous wave and pulsed wave (pulsatile delivery of ultrasound) may be employed in any combination. For example, continuous wave ultrasound may be applied, followed by pulsed wave ultrasound, or vice versa. This may be repeated any number of times, in any order and combination. The pulsed wave ultrasound may be applied against a background of continuous wave ultrasound, and any number of pulses may be used in any number of groups.

[0350] Preferably, the ultrasound may comprise pulsed wave ultrasound. In a highly preferred embodiment, the ultrasound is applied at a power density of 0.7 Wcm-2 or 1.25 Wcm-2 as a continuous wave. Higher power densities may be employed if pulsed wave ultrasound is used.

[0351] Use of ultrasound is advantageous as, like light, it may be focused accurately on a target. Moreover, ultrasound is advantageous as it may be focused more deeply into tissues unlike light. It is therefore better suited to whole-tissue penetration (such as but not limited to a lobe of the liver) or whole organ (such as but not limited to the entire liver or an entire muscle, such as the heart) therapy. Another important advantage is that ultrasound is a non-invasive stimulus which is used in a wide variety of diagnostic and therapeutic applications. By way of example, ultrasound is well known in medical imaging techniques and, additionally, in orthopedic therapy. Furthermore, instruments suitable for the application of ultrasound to a subject vertebrate are widely available and their use is well known in the art.

[0352] In one embodiment, the CRISPR-associated guide molecule is modified by a secondary structure to increase the specificity of the nucleic acid-guided nuclease and related system and the secondary structure can protect against exonuclease activity and allow for 5′ additions to the guide sequence also referred to herein as a protected CRISPR-associated guide molecule.

[0353] In one aspect, the invention provides for hybridizing a “protector RNA” to a sequence of the CRISPR-associated guide molecule, wherein the “protector RNA” is an RNA strand complementary to the 3′ end of the guide molecule to thereby generate a partially double-stranded CRISPR-associated guide RNA. In an embodiment of the invention, protecting mismatched bases (i.e., the bases of the guide molecule which do not form part of the guide sequence) with a perfectly complementary protector sequence decreases the likelihood of target DNA binding to the mismatched basepairs at the 3′ end. In one embodiment of the invention, additional sequences comprising an extended length may also be present within the CRISPR-associated guide molecule such that the CRISPR-associated guide comprises a protector sequence within the CRISPR-associated guide molecule. This “protector sequence” ensures that the CRISPR-associated guide molecule comprises a “protected sequence” in addition to an “exposed sequence” (comprising the part of the CRISPR-associated guide sequence hybridizing to the target sequence). In one embodiment, the CRISPR-associated guide molecule is modified by the presence of the protector guide to comprise a secondary structure such as a hairpin. Advantageously there are three or four to thirty or more, e.g., about 10 or more, contiguous base pairs having complementarity to the protected sequence, the CRISPR-associated guide sequence or both. It is advantageous that the protected portion does not impede thermodynamics of the nucleic acid-guided nuclease and related system interacting with its target. By providing such an extension including a partially double stranded CRISPR-associated guide molecule, the CRISPR-associated guide molecule is considered protected and results in improved specific binding of the nucleic acid-guided nuclease/CRISPR-associated guide molecule complex, while maintaining specific activity.

[0354] In one embodiment, use is made of a truncated CRISPR-associated guide (tru-CRISPR-associated guide), i.e. a CRISPR-associated guide molecule which comprises a CRISPR-associated guide sequence which is truncated in length with respect to the canonical CRISPR-associated guide sequence length. As described by Nowak et al. (Nucleic Acids Res (2016) 44 (20): 9555-9564), such guides may allow catalytically active nucleic acid-guided nuclease to bind its target without cleaving the target DNA. In one embodiment, a truncated CRISPR-associated guide is used which allows the binding of the target but retains only nickase activity of the nucleic acid-guided nuclease.

[0355] In one embodiment, conjugation of triantennary N-acetyl galactosamine (GalNAc) to oligonucleotide components may be used to improve delivery, for example delivery to select cell types, for example hepatocytes (see International Patent Publication No. WO 2014/118272 incorporated herein by reference; Nair, J K et al., 2014, Journal of the American Chemical Society 136 (49), 16958-16961). This is considered to be a sugar-based particle and further details on other particle delivery systems and/or formulations are provided herein. GalNAc can therefore be considered to be a particle in the sense of the other particles described herein, such that general uses and other considerations, for instance delivery of said particles, apply to GalNAc particles as well. A solution-phase conjugation strategy may for example be used to attach triantennary GalNAc clusters (mol. wt. ˜2000) activated as PFP (pentafluorophenyl) esters onto 5′-hexylamino modified oligonucleotides (5′-HA ASOs, mol. wt. ˜8000 Da; Ostergaard et al., Bioconjugate Chem., 2015, 26 (8), pp 1451-1455). Similarly, poly(acrylate) polymers have been described for in vivo nucleic acid delivery (see WO2013158141 incorporated herein by reference). In further alternative embodiments, pre-mixing nucleic acid-guided nuclease nanoparticles (or protein complexes) with naturally occurring serum proteins may be used in order to improve delivery (Akinc A et al, 2010, Molecular Therapy vol. 18 no. 7, 1357-1364).

[0356] Screening techniques are available to identify delivery enhancers, for example by screening chemical libraries (Gilleron J. et al., 2015, Nucl. Acids Res. 43 (16): 7984-8001). Approaches have also been described for assessing the efficiency of delivery vehicles, such as lipid nanoparticles, which may be employed to identify effective delivery vehicles for components (see Sahay G. et al., 2013, Nature Biotechnology 31, 653-658).

### Functional Domains

[0357] The nucleic acid-guided nuclease (including variants such as a catalytically inactive form) may be associated with one or more functional domains (e.g., via fusion protein or suitable linkers). In an embodiment, the nucleic acid-guided nuclease, or an ortholog or homolog thereof, may be used as a generic nucleic acid binding protein with fusion to or being operably linked to one or more functional domains. In one example, the functional domain is a deaminase. In another example, the functional domain is a transposase. In another example, the functional domain is a reverse transcriptase. In some cases, a functional domain may be associate with (e.g., fuse to) the nucleic acid-guided nuclease. In some cases, a functional domain may be a protein different from the nucleic acid-guided nuclease. In such cases, a functional domain and the nucleic acid-guided nuclease may form a protein complex.

[0358] It is also envisaged that the nucleic acid-guided nuclease-guide molecule complex as a whole may be associated with two or more functional domains. For example, there may be two or more functional domains associated with the nucleic acid-guided nuclease, or there may be two or more functional domains associated with the guide RNA or crRNA (via one or more adaptor proteins), or there may be one or more functional domains associated with the RNA-targeting effector protein and one or more functional domains associated with the guide RNA or crRNA (via one or more adaptor proteins).

[0359] In one embodiment, the nucleic acid-guided nuclease is associated with one or more functional domains. The association can be by direct linkage of the effector protein to the functional domain, or by association with the crRNA. In a non-limiting example, the crRNA comprises an added or inserted sequence that can be associated with a functional domain of interest, including, for example, an aptamer or a nucleotide that binds to a nucleic acid binding adapter protein. The functional domain may be a functional heterologous domain.

[0360] In one embodiment, the invention also provides for the one or more heterologous functional domains to have one or more of the following activities: methylase activity, demethylase activity, transcription activation activity, transcription repression activity, transcription release factor activity, histone modification activity, nuclease activity, single-strand RNA cleavage activity, double-strand RNA cleavage activity, single-strand DNA cleavage activity, double-strand DNA cleavage activity and nucleic acid binding activity. At least one or more heterologous functional domains may be at or near the amino-terminus of the effector protein and/or wherein at least one or more heterologous functional domains is at or near the carboxy-terminus of the effector protein. The one or more heterologous functional domains may be fused to the effector protein. The one or more heterologous functional domains may be tethered to the effector protein. The one or more heterologous functional domains may be linked to the effector protein by a linker moiety.

[0361] In an embodiment, the nucleic acid-guided nuclease or an ortholog or homolog thereof, may be used as a generic nucleic acid binding protein with fusion to or being operably linked to a functional domain. Exemplary functional domains may include but are not limited to translational initiator, translational activator, translational repressor, nucleases, in particular ribonucleases, a spliceosome, beads, a light inducible/controllable domain or a chemically inducible/controllable domain. In an embodiment, the one or more functional domains are controllable, e.g., inducible.

[0362] In one embodiment, one or more functional domains are associated with a nucleic acid-guided nuclease via an adaptor protein, for example as used with the modified guides of Konnerman et al. (Nature 517, 583-588, 29 Jan. 2015). In one embodiment, the one or more functional domains is attached to the adaptor protein so that upon binding of the nucleic acid-guided nuclease to the guide molecule and target, the functional domain is in a spatial orientation allowing for the functional domain to function in its attributed function.

[0363] In one embodiment, one or more functional domains are associated with a dead guide molecule, e.g., gRNA (dRNA). In one embodiment, a dRNA complex with active Nucleic acid-guided nuclease directs gene regulation by a functional domain at on gene locus while an gRNA directs DNA cleavage by the active Nucleic acid-guided nuclease at another locus, for example as described analogously in CRISPR-Cas systems by Dahlman et al., ‘Orthogonal gene control with a catalytically active Cas9 nuclease’. In one embodiment, dRNAs are selected to maximize selectivity of regulation for a gene locus of interest compared to off-target regulation. In one embodiment, dRNAs are selected to maximize target gene regulation and minimize target cleavage

[0364] For the purposes of the following discussion, reference to a functional domain could be a functional domain associated with the Nucleic acid-guided nuclease or a functional domain associated with the adaptor protein. In one embodiment, the one or more functional domains is attached to the adaptor protein so that upon binding of the Nucleic acid-guided nuclease to the guide molecule and target, the functional domain is in a spatial orientation allowing for the functional domain to function in its attributed function.

[0365] In the practice of the invention, loops of the guide RNA may be extended, without colliding with the Nucleic acid-guided nuclease by the insertion of distinct RNA loop(s) or distinct sequence(s) that may recruit adaptor proteins that can bind to the distinct RNA loop(s) or distinct sequence(s). The adaptor proteins may include but are not limited to orthogonal RNA-binding protein/aptamer combinations that exist within the diversity of bacteriophage coat proteins. A list of such coat proteins includes, but is not limited to: Qβ, F2, GA, fr, JP501, M12, R17, BZ13, JP34, JP500, KU1, M11, MX1, TW18, VK, SP, FI, ID2, NL95, TW19, AP205, ϕCb5, ϕCb8r, ϕCb12r, ϕCb23r, 7s and PRR1. These adaptor proteins or orthogonal RNA binding proteins can further recruit effector proteins or fusions which comprise one or more functional domains.

[0366] Examples of functional domains include deaminase domain, transposase domain, reverse transcriptase domain, integrase domain, recombinase domain, resolvase domain, invertase domain, protease domain, DNA methyltransferase domain, DNA hydroxylmethylase domain, DNA demethylase domain, histone acetylase domain, histone deacetylases domain, nuclease domain, repressor domain, activator domain, nuclear-localization signal domains, transcription-regulatory protein (or transcription complex recruiting) domain, cellular uptake activity associated domain, nucleic acid binding domain, antibody presentation domain, histone modifying enzymes, recruiter of histone modifying enzymes; inhibitor of histone modifying enzymes, histone methyltransferase, histone demethylase, histone kinase, histone phosphatase, histone ribosylase, histone deribosylase, histone ubiquitinase, histone deubiquitinase, histone biotinase and histone tail protease. In some preferred embodiments, the functional domain is a transcriptional activation domain, such as, without limitation, VP64, p65, MyoD1, HSF1, RTA, SET7/9 or a histone acetyltransferase. In one embodiment, the functional domain is a transcription repression domain, preferably KRAB. In one embodiment, the transcription repression domain is SID, or concatemers of SID (e.g. SID4X). In one embodiment, the functional domain is an epigenetic modifying domain, such that an epigenetic modifying enzyme is provided. In one embodiment, the functional domain is an activation domain, which may be the P65 activation domain.

[0367] In some examples, the Nucleic acid-guided nuclease is associated with a ligase or functional fragment thereof. The ligase may ligate a single-strand break (a nick) generated by the Nucleic acid-guided nuclease. In certain cases, the ligase may ligate a double-strand break generated by the nucleic acid-guided nuclease. In certain examples, the nucleic acid-guided nuclease is associated with a reverse transcriptase or functional fragment thereof.

[0368] In one embodiment, the one or more functional domains is a transcriptional repressor domain. In one embodiment, the transcriptional repressor domain is a KRAB domain. In one embodiment, the transcriptional repressor domain is a NuE domain, NcoR domain, SID domain or a SID4X domain.

[0369] In one embodiment, the one or more functional domains have one or more activities, e.g., one or more of transposase activity, methylase activity, demethylase activity, translation activation activity, translation repression activity, transcription activation activity, transcription repression activity, transcription release factor activity, chromatin modifying or remodeling activity, histone modification activity, nuclease activity, single-strand RNA cleavage activity, double-strand RNA cleavage activity, single-strand DNA cleavage activity, double-strand DNA cleavage activity, nucleic acid binding activity, and detectable activity.

[0370] Histone modifying domains are also preferred In one embodiment. Exemplary histone modifying domains are discussed below. Transposase domains, HR (Homologous Recombination) machinery domains, recombinase domains, and/or integrase domains are also preferred as the present functional domains. In one embodiment, DNA integration activity includes HR machinery domains, integrase domains, recombinase domains and/or transposase domains.

[0371] In one embodiment, the DNA cleavage activity is due to a nuclease. In one embodiment, the nuclease comprises a Fok1 nuclease. See, “Dimeric CRISPR RNA-guided FokI nucleases for highly specific genome editing”, Shengdar Q. Tsai, Nicolas Wyvekens, Cyd Khayter, Jennifer A. Foden, Vishal Thapar, Deepak Reyon, Mathew J. Goodwin, Martin J. Aryee, J. Keith Joung Nature Biotechnology 32(6): 569-77 (2014), relates to dimeric RNA-guided FokI Nucleases that recognize extended sequences and can edit endogenous genes with high efficiencies in human cells.

[0372] In one embodiment, the one or more functional domains is attached to the nucleic acid-guided nuclease so that upon binding to the sgRNA and target the functional domain is in a spatial orientation allowing for the functional domain to function in its attributed function.

[0373] In one embodiment, the nucleic acid-guided nuclease comprise one or more heterologous functional domains. As used herein, a heterologous functional domain is a polypeptide that is not derived from the same species as the nucleic acid-guided nuclease. For example, a heterologous functional domain of a nucleic acid-guided nuclease derived from species A is a polypeptide derived from a species different from species A, or an artificial polypeptide. The one or more heterologous functional domains may comprise one or more nuclear localization signal (NLS) domains. The one or more heterologous functional domains may comprise at least two or more NLSs. The one or more heterologous functional domains may comprise one or more transcriptional activation domains. A transcriptional activation domain may comprise VP64. The one or more heterologous functional domains may comprise one or more transcriptional repression domains. A transcriptional repression domain may comprise a KRAB domain or a SID domain. The one or more heterologous functional domain may comprise one or more nuclease domains. The one or more nuclease domains may comprise Fok1.

[0374] Functional domains may be used to regulate transcription, e.g., transcriptional repression. Transcriptional repression is often mediated by chromatin modifying enzymes such as histone methyltransferases (HMTs) and deacetylases (HDACs). Repressive histone effector domains are known and an exemplary list is provided below. In the exemplary table, preference was given to proteins and functional truncations of small size to facilitate efficient viral packaging (for instance via AAV). In general, however, the domains may include HDACs, histone methyltransferases (HMTs), and histone acetyltransferase (HAT) inhibitors, as well as HDAC and HMT recruiting proteins. The functional domain may be or include, In one embodiment, HDAC Effector Domains, HDAC Recruiter Effector Domains, Histone Methyltransferase (HMT) Effector Domains, Histone Methyltransferase (HMT) Recruiter Effector Domains, or Histone Acetyltransferase Inhibitor Effector Domains.

[0375] In one embodiment, the functional domain may be a Methyltransferase (HMT) Effector Domain. Preferred examples include NUE, vSET, EHMT2/G9A, SUV39H1, dim-5, KYP, SUVR4, SET4, SET1, SETD8, and TgSET8. NUE is exemplified in the present Examples and, although preferred, it is envisaged that others in the class will also be useful.

[0376] In one embodiment, the functional domain may be a Histone Methyltransferase (HMT) Recruiter Effector Domain. Preferred examples include Hp1a, PHF19, and NIPP1.

[0377] In one embodiment, the functional domain may be Histone Acetyltransferase Inhibitor Effector Domain. Preferred examples include SET/TAF-1β.

[0378] In some cases, the target endogenous (regulatory) control elements (such as enhancers and silencers) in addition to a promoter or promoter-proximal elements. Thus, the invention can also be used to target endogenous control elements (including enhancers and silencers) in addition to targeting of the promoter. These control elements can be located upstream and downstream of the transcriptional start site (TSS), starting from 200 bp from the TSS to 100 kb away. Targeting of known control elements can be used to activate or repress the gene of interest. In some cases, a single control element can influence the transcription of multiple target genes. Targeting of a single control element could therefore be used to control the transcription of multiple genes simultaneously.

[0379] Targeting of putative control elements on the other hand (e.g. by tiling the region of the putative control element as well as 200 bp up to 100 kB around the element) can be used as a means to verify such elements (by measuring the transcription of the gene of interest) or to detect novel control elements (e.g. by tiling 100 kb upstream and downstream of the TSS of the gene of interest). In addition, targeting of putative control elements can be useful in the context of understanding genetic causes of disease. Many mutations and common SNP variants associated with disease phenotypes are located outside coding regions. Targeting of such regions with either the activation or repression systems described herein can be followed by readout of transcription of either a) a set of putative targets (e.g. a set of genes located in closest proximity to the control element) or b) whole-transcriptome readout by e.g. RNAseq or microarray. This would allow for the identification of likely candidate genes involved in the disease phenotype. Such candidate genes could be useful as novel drug targets.

[0380] In one embodiment is for the one or more functional domains to comprise an acetyltransferase, preferably a histone acetyltransferase. These are useful in the field of epigenomics, for example in methods of interrogating the epigenome. Methods of interrogating the epigenome may include, for example, targeting epigenomic sequences. Targeting epigenomic sequences may include the guide being directed to an epigenomic target sequence. Epigenomic target sequence may include, In one embodiment, include a promoter, silencer or an enhancer sequence.

[0381] The functional domains may be acetyltransferases domains. Examples of acetyltransferases are known but may include, In one embodiment, histone acetyltransferases. In one embodiment, the histone acetyltransferase may comprise the catalytic core of the human acetyltransferase p300 (Gerbasch & Reddy, Nature Biotech 6 Apr. 2015).

### Nuclear Localization Sequences

[0382] In one embodiment, the nucleic acid-guided nuclease is fused to one or more nuclear localization sequences (NLSs), such as about or more than about 1, 2, 3, 4, 5, 6, 7, 8, 9, 10, or more NLSs. In one embodiment, the Nucleic acid-guided nuclease comprises about or more than about 1, 2, 3, 4, 5, 6, 7, 8, 9, 10, or more NLSs at or near the amino-terminus, about or more than about 1, 2, 3, 4, 5, 6, 7, 8, 9, 10, or more NLSs at or near the carboxy-terminus, or a combination of these (e.g. zero or at least one or more NLS at the amino-terminus and zero or at one or more NLS at the carboxy terminus).

[0383] In one embodiment, the IscB polypeptide nuclease is fused to one or more nuclear localization sequences (NLSs), such as about or more than about 1, 2, 3, 4, 5, 6, 7, 8, 9, 10, or more NLSs. In one embodiment, the IscB polypeptide nuclease comprises about or more than about 1, 2, 3, 4, 5, 6, 7, 8, 9, 10, or more NLSs at or near the amino-terminus, about or more than about 1, 2, 3, 4, 5, 6, 7, 8, 9, 10, or more NLSs at or near the carboxy-terminus, or a combination of these (e.g. zero or at least one or more NLS at the amino-terminus and zero or at one or more NLS at the carboxy terminus).

[0384] When more than one NLS is present, each may be selected independently of the others, such that a single NLS may be present in more than one copy and/or in combination with one or more other NLSs present in one or more copies. In a preferred embodiment of the invention, the Nucleic acid-guided nuclease comprises at most 6 NLSs. In a preferred embodiment of the invention, the IscB polypeptide nuclease comprises at most 6 NLSs.

[0385] In one embodiment, an NLS is considered near the N- or C-terminus when the nearest amino acid of the NLS is within about 1, 2, 3, 4, 5, 10, 15, 20, 25, 30, 40, 50, or more amino acids along the polypeptide chain from the N- or C-terminus. Non-limiting examples of NLSs include an NLS sequence derived from: the NLS of the SV40 virus large T-antigen, having the amino acid sequence PKKKRKV (SEQ ID NO: 2002); the NLS from nucleoplasmin (e.g. the nucleoplasmin bipartite NLS with the sequence KRPAATKKAGQAKKKK (SEQ ID NO: 2003); the c-myc NLS having the amino acid sequence PAAKRVKLD (SEQ ID NO: 2004) or RQRRNELKRSP (SEQ ID NO: 2005); the hRNPA1 M9 NLS having the sequence NQSSNFGPMKGGNFGGRSSGPYGGGGQYFAKPRNQGGY (SEQ ID NO: 2006); the sequence RMRIZFKNKGKDTAELRRRRVEVSVELRKAKKDEQILKRRNV (SEQ ID NO: 2007) of the IBB domain from importin-alpha; the sequences VSRKRPRP (SEQ ID NO: 2008) and PPKKARED (SEQ ID NO: 2009) of the myoma T protein; the sequence PQPKKKPL (SEQ ID NO: 2010) of human p53; the sequence SALIKKKKKMAP (SEQ ID NO: 2011) of mouse c-abl IV; the sequences DRLRR (SEQ ID NO: 2012) and PKQKKRK (SEQ ID NO: 2013) of the influenza virus NS1; the sequence RKLKKKIKKL (SEQ ID NO: 2014) of the Hepatitis virus delta antigen; the sequence REKKKFLKRR (SEQ ID NO: 2015) of the mouse Mxl protein; the sequence KRKGDEVDGVDEVAKKKSKK (SEQ ID NO: 2016) of the human poly(ADP-ribose) polymerase; and the sequence RKCLQAGMNLEARKTKK (SEQ ID NO: 2017) of the steroid hormone receptors (human) glucocorticoid.

[0386] In general, the one or more NLSs are of sufficient strength to drive accumulation of the nucleic acid-guided nuclease in a detectable amount in the nucleus of a eukaryotic cell. In general, strength of nuclear localization activity may derive from the number of NLSs in the nucleic acid-guided nuclease, the particular NLS(s) used, or a combination of these factors. Detection of accumulation in the nucleus may be performed by any suitable technique. For example, a detectable marker may be fused to the nucleic acid-guided nuclease, such that location within a cell may be visualized, such as in combination with a means for detecting the location of the nucleus (e.g. a stain specific for the nucleus such as DAPI). Cell nuclei may also be isolated from cells, the contents of which may then be analyzed by any suitable process for detecting protein, such as immunohistochemistry, Western blot, or enzyme activity assay. Accumulation in the nucleus may also be determined indirectly, such as by an assay for the effect of complex formation (e.g. assay for DNA cleavage or mutation at the target sequence, or assay for altered gene expression activity affected by complex formation and/or nucleic acid-guided nuclease activity), as compared to a control no exposed to the nucleic acid-guided nuclease or complex, or exposed to a nucleic acid-guided nuclease lacking the one or more NLSs. In an embodiment of the herein described nucleic acid-guided nuclease protein complexes and systems the codon optimized nucleic acid-guided nuclease proteins comprise an NLS attached to the C-terminal of the protein. In an embodiment, other localization tags may be fused to the nucleic acid-guided nuclease, such as without limitation for localizing the nucleic acid-guided nuclease to particular sites in a cell, such as organelles, such as mitochondria, plastids, chloroplast, vesicles, golgi, (nuclear or cellular) membranes, ribosomes, nucleolus, ER, cytoskeleton, vacuoles, centrosome, nucleosome, granules, centrioles, etc.

[0387] In general, the one or more NLSs are of sufficient strength to drive accumulation of the IscB polypeptide nuclease in a detectable amount in the nucleus of a eukaryotic cell. In general, strength of nuclear localization activity may derive from the number of NLSs in the IscB polypeptide nuclease, the particular NLS(s) used, or a combination of these factors. Detection of accumulation in the nucleus may be performed by any suitable technique. For example, a detectable marker may be fused to the IscB polypeptide nuclease, such that location within a cell may be visualized, such as in combination with a means for detecting the location of the nucleus (e.g. a stain specific for the nucleus such as DAPI). Cell nuclei may also be isolated from cells, the contents of which may then be analyzed by any suitable process for detecting protein, such as immunohistochemistry, Western blot, or enzyme activity assay. Accumulation in the nucleus may also be determined indirectly, such as by an assay for the effect of complex formation (e.g. assay for DNA cleavage or mutation at the target sequence, or assay for altered gene expression activity affected by complex formation and/or IscB polypeptide nuclease activity), as compared to a control not exposed to the IscB polypeptide nuclease or complex, or exposed to a IscB polypeptide nuclease lacking the one or more NLSs. In an embodiment of the herein described IscB polypeptide nuclease protein complexes and systems the codon optimized IscB polypeptide nuclease proteins comprise an NLS attached to the C-terminal of the protein. In an embodiment, other localization tags may be fused to the IscB polypeptide nuclease, such as without limitation for localizing the IscB polypeptide nuclease to particular sites in a cell, such as organelles, such as mitochondria, plastids, chloroplast, vesicles, golgi, (nuclear or cellular) membranes, ribosomes, nucleolus, ER, cytoskeleton, vacuoles, centrosome, nucleosome, granules, centrioles, etc.

[0388] In an embodiment of the invention, at least one nuclear localization signal (NLS) is attached to the nucleic acid sequences encoding the IscB polypeptide nuclease. In preferred embodiments at least one or more C-terminal or N-terminal NLSs are attached (and hence nucleic acid molecule(s) coding for the IscB polypeptide nuclease can include coding for NLS(s) so that the expressed product has the NLS(s) attached or connected). In a preferred embodiment a C-terminal NLS is attached for optimal expression and nuclear targeting in eukaryotic cells, preferably human cells. The invention also encompasses methods for delivering multiple nucleic acid components, wherein each nucleic acid component is specific for a different target locus of interest thereby modifying multiple target loci of interest. The nucleic acid component of the complex may comprise one or more protein-binding RNA aptamers. The one or more aptamers may be capable of binding a bacteriophage coat protein.

### Linkers

[0389] In an embodiment of the invention, at least one nuclear localization signal (NLS) is attached to the nucleic acid sequences encoding the nucleic acid-guided nuclease or the IscB polypeptide nuclease. In preferred embodiments at least one or more C-terminal or N-terminal NLSs are attached (and hence nucleic acid molecule(s) coding for the nucleic acid-guided nuclease or IscB polypeptide nuclease can include coding for NLS(s) so that the expressed product has the NLS(s) attached or connected). In a preferred embodiment a C-terminal NLS is attached for optimal expression and nuclear targeting in eukaryotic cells, preferably human cells. The invention also encompasses methods for delivering multiple nucleic acid components, wherein each nucleic acid component is specific for a different target locus of interest thereby modifying multiple target loci of interest. The nucleic acid component of the complex may comprise one or more protein-binding RNA aptamers. The one or more aptamers may be capable of binding a bacteriophage coat protein.

[0390] In some preferred embodiments, the functional domain is linked to a nucleic acid-guided nuclease (e.g., an active or a dead nucleic acid-guided nuclease) to target and activate epigenomic sequences such as promoters or enhancers. One or more guides directed to such promoters or enhancers may also be provided to direct the binding of the nucleic acid-guided nuclease to such promoters or enhancers.

[0391] In some preferred embodiments, the functional domain is linked to a IscB polypeptide nuclease (e.g., an active or a dead IscB polypeptide nuclease) to target and activate epigenomic sequences such as promoters or enhancers. One or more guides directed to such promoters or enhancers may also be provided to direct the binding of the IscB polypeptide nuclease to such promoters or enhancers.

[0392] The term “associated with” is used here in relation to the association of the functional domain to the IscB polypeptide nuclease protein, nucleic acid-guided nuclease, or the adaptor protein. It is used in respect of how one molecule ‘associates’ with respect to another, for example between an adaptor protein and a functional domain, between the IscB polypeptide nuclease protein and a functional domain, or between the nucleic acid guided nuclease protein and a functional domain. In the case of such protein-protein interactions, this association may be viewed in terms of recognition in the way an antibody recognizes an epitope. Alternatively, one protein may be associated with another protein via a fusion of the two, for instance one subunit being fused to another subunit. Fusion typically occurs by addition of the amino acid sequence of one to that of the other, for instance via splicing together of the nucleotide sequences that encode each protein or subunit. Alternatively, this may essentially be viewed as binding between two molecules or direct linkage, such as a fusion protein. In any event, the fusion protein may include a linker between the two subunits of interest (i.e. between the enzyme and the functional domain or between the adaptor protein and the functional domain). Thus, in one embodiment, the IscB polypeptide nuclease protein, nucleic acid-guided nuclease, or adaptor protein is associated with a functional domain by binding thereto. In other embodiments, the IscB polypeptide nuclease, nucleic acid-guided nuclease, or adaptor protein is associated with a functional domain because the two are fused together, optionally via an intermediate linker.

[0393] The term “linker” as used in reference to a fusion protein refers to a molecule which joins the proteins to form a fusion protein. Generally, such molecules have no specific biological activity other than to join or to preserve some minimum distance or other spatial relationship between the proteins. However, in an embodiment, the linker may be selected to influence some property of the linker and/or the fusion protein such as the folding, net charge, or hydrophobicity of the linker.

[0394] Suitable linkers for use in the methods of the present invention are well known to those of skill in the art and include, but are not limited to, straight or branched-chain carbon linkers, heterocyclic carbon linkers, or peptide linkers. However, as used herein the linker may also be a covalent bond (carbon-carbon bond or carbon-heteroatom bond).

[0395] In one embodiment, the linker is used to separate the IscB polypeptide nuclease and the nucleotide deaminase by a distance sufficient to ensure that each protein retains its required functional property. In one embodiment, the linker is used to separate the nucleic acid-guided nuclease and the nucleotide deaminase by a distance sufficient to ensure that each protein retains its required functional property.

[0396] Preferred peptide linker sequences adopt a flexible extended conformation and do not exhibit a propensity for developing an ordered secondary structure. In an embodiment, the linker can be a chemical moiety which can be monomeric, dimeric, multimeric or polymeric. Preferably, the linker comprises amino acids. Typical amino acids in flexible linkers include Gly, Asn and Ser. Accordingly, in one embodiment, the linker comprises a combination of one or more of Gly, Asn and Ser amino acids. Other near neutral amino acids, such as Thr and Ala, also may be used in the linker sequence. Exemplary linkers are disclosed in Maratea et al. (1985), Gene 40: 39-46; Murphy et al. (1986) Proc. Nat'l. Acad. Sci. USA 83: 8258-62; U.S. Pat. Nos. 4,935,233; and 4,751,180. For example, GlySer linkers GGS, GGGS (SEQ ID NO: 2018) or GSG can be used. GGS, GSG, GGGS (SEQ ID NO: 2018) or GGGGS (SEQ ID NO: 2019) linkers can be used in repeats of 3 (such as (GGS)₃, (SEQ ID NO: 2020) (GGGGS)₃) (SEQ ID NO: 2021) or 5, 6, 7, 9 or even 12 or more, to provide suitable lengths. In some cases, the linker may be (GGGGS)₃₋₁₅, For example, in some cases, the linker may be (GGGGS)₃₋₁₁, e.g., GGGGS (SEQ ID NO: 2022), (GGGGS)₂ (SEQ ID NO: 2023), (GGGGS)₃ (SEQ ID NO: 2021), (GGGGS)₄ (SEQ ID NO: 2024), (GGGGS)₅ (SEQ ID NO: 2025), (GGGGS)₆ (SEQ ID NO: 2026), (GGGGS)₇ (SEQ ID NO: 2027), (GGGGS)₅ (SEQ ID NO: 2028), (GGGGS)₉ (SEQ ID NO: 2029), (GGGGS)₁₀ (SEQ ID NO: 2030), or (GGGGS)₁₁ (SEQ ID NO: 2031).

[0397] In one embodiment, linkers such as (GGGGS)₃ (SEQ ID NO: 2021) are preferably used herein. (GGGGS)₆ (SEQ ID NO: 2026), (GGGGS)₉ (SEQ ID NO: 2029) or (GGGGS)₁₂ (SEQ ID NO: 2032) may preferably be used as alternatives. Other preferred alternatives are (GGGGS)₁ (SEQ ID NO:2022), (GGGGS)₂ (SEQ ID NO: 2023), (GGGGS)₄ (SEQ ID NO: 2024), (GGGGS)₅ (SEQ ID NO: 2025), (GGGGS)₇ (SEQ ID NO: 2027), (GGGGS)₅ (SEQ ID NO: 2028), (GGGGS)₁₀ (SEQ ID NO: 2030), or (GGGGS)₁₁ (SEQ ID NO: 2031). In yet a further embodiment, LEPGEKPYKCPECGKSFSQSGALTRHQRTHTR (SEQ ID NO: 2033) is used as a linker. In yet an additional embodiment, the linker is an XTEN linker. In one embodiment, the IscB polypeptide nuclease or the nucleic acid-guided nuclease is linked to the deaminase protein or its catalytic domain by means of an LEPGEKPYKCPECGKSFSQSGALTRHQRTHTR (SEQ ID NO: 2033) linker. In further one embodiment, IscB polypeptide nuclease is linked C-terminally to the N-terminus of a deaminase protein or its catalytic domain by means of an LEPGEKPYKCPECGKSFSQSGALTRHQRTHTR (SEQ ID NO: 2033) linker. In addition, N- and C-terminal NLSs can also function as linker (e.g., PKKKRKVEASSPKKRKVEAS (SEQ ID NO: 2034)).

TABLE 4
Examples of linkers used in
the invention are shown.

| | |
|---|---|
| GGS | GGTGGTAGT |
| GGSx3 (9) | GGTGGTAGTGGAGGGAGCGGCGGTTCA |
| (SEQ ID NO: | (SEQ ID NO: 2036) |
| 2020) | |
| GGSx7 (21) | ggtggaggaggctctggtggaggcggtagc |
| | ggaggcggagggtcgGGTGGTAGTGGAGGG |
| | AGCGGCGGTTCA |
| (SEQ ID NO: | |
| 2035) | (SEQ ID NO: 2037) |
| XTEN | TCGGGATCTGAGACGCCTGGGACCTCGGAA |
| | TCGGCTACGCCCGAAAGT |
| | (SEQ ID NO: 2038) |
| Z-EGFR_ | Gtggataacaaatttaacaaagaaatgtgg |
| Short | gcggcgtgggaagaaattcgtaacctgccg |
| | aacctgaacggctggcagatgaccgcgttt |
| | attgcgagcctggtggatgatccgagccag |
| | agcgcgaacctgctggcggaagcgaaaaaa |
| | ctgaacgatgcgcaggcgccgaaaaccggc |
| | ggtggttctggt (SEQ ID NO: 2039) |
| GSAT | Ggtggttctgccggtggctccggttctggc |
| | tccagcggtggcagctctggtgcgtccggc |
| | acgggtactgcgggtggcactggcagcggt |
| | tccggtactggctctggc |
| | (SEQ ID NO: 2040) |

[0398] Linkers may be used between the hRNA molecules and the functional domain (activator or repressor), or between the IscB polypeptide nuclease and the functional domain. In an embodiment, linkers may be used between the guide molecules and the functional domain (e.g. activator or repressor), or between the Cas IscB polypeptide nuclease and the functional domain. The linkers may be used to engineer appropriate amounts of “mechanical flexibility”.

[0399] In an embodiment, the one or more functional domains are controllable, e.g., inducible.

### Base Editing

[0400] The present disclosure also provides for base editing systems. In general, such a system may comprise a deaminase (e.g., an adenosine deaminase or cytidine deaminase) associated (e.g., fused) with a IscB polypeptide nuclease, e.g., IscB protein. The IscB polypeptide nuclease may be a dead IscB polypeptide nuclease (such as a IscB polypeptide nickase, e.g., engineered from a IscB polypeptide nuclease). In certain examples, the nucleotide deaminase is a mutated form of an adenosine deaminase The mutated form of the adenosine deaminase may have both adenosine deaminase and cytidine deaminase activities.

[0401] In some examples, the present disclosure provides an engineered, non-naturally occurring composition comprising: the nuclei acid-guided nuclease that is catalytically inactive, a nucleotide deaminase associated with or otherwise capable of forming a complex with the IscB protein, and a single hRNA molecule or single guide RNA molecule capable of forming a complex with the IscB protein and directing site-specific binding at a target sequence.

[0402] In one aspect, the present disclosure provides an engineered adenosine deaminase. The engineered adenosine deaminase may comprise one or more mutations herein. In one embodiment, the engineered adenosine deaminase has cytidine deaminase activity. In certain examples, the engineered adenosine deaminase has both cytidine deaminase activity and adenosine deaminase. In some cases, the modifications by base editors herein may be used for targeting post-translational signaling or catalysis. In one embodiment, compositions herein comprise nucleotide sequence comprising encoding sequences for one or more components of a base editing system. A base-editing system may comprise a deaminase (e.g., an adenosine deaminase or cytidine deaminase) fused with a IscB polypeptide nuclease or a variant thereof. In some cases, the target polynucleotide is edited at one or more bases to introduce a G→A or C→T mutation.

[0403] In some cases, the adenosine deaminase is double-stranded RNA-specific adenosine deaminase (ADAR). Examples of ADARs include those described Yiannis A Savva et al., The ADAR protein family, Genome Biol. 2012; 13(12): 252, which is incorporated by reference in its entirety. In some examples, the ADAR may be hADAR1. In certain examples, the ADAR may be hADAR2. The sequence of hADAR2 may be that described under Accession No. AF525422.1.

[0404] In some cases, the deaminase may be a deaminase domain, e.g., a deaminase domain of ADAR (“ADAR-D”). In one example, the deaminase may be the deaminase domain of hADAR2 (“hADAR2-D), e.g., as described in Phelps K J et al., Recognition of duplex RNA by the deaminase domain of the RNA editing enzyme ADAR2. Nucleic Acids Res. 2015 January; 43(2):1123-32, which is incorporated by reference herein in its entirety. In a particular example, the hADAR2-D has a sequence comprising amino acid 299-701 of hADAR2-D, e.g., amino acid 299-701 of the sequence under Accession No. AF525422.1.

[0405] In certain examples, the system comprises a mutated form of an adenosine deaminase fused with a dead IscB polypeptide nuclease (e.g., a IscB polypeptide nickase). The mutated form of the adenosine deaminase may have both adenosine deaminase and cytidine deaminase activities. In one embodiment, the adenosine deaminase may comprise one or more of the mutations: E488Q based on amino acid sequence positions of hADAR2-D, and mutations in a homologous ADAR protein corresponding to the above. In one embodiment, the adenosine deaminase may comprise one or more of the mutations: E488Q, V351G, based on amino acid sequence positions of hADAR2-D, and mutations in a homologous ADAR protein corresponding to the above. In one embodiment, the adenosine deaminase may comprise one or more of the mutations: E488Q, V351G, S486A, based on amino acid sequence positions of hADAR2-D, and mutations in a homologous ADAR protein corresponding to the above. In one embodiment, the adenosine deaminase may comprise one or more of the mutations: E488Q, V351G, S486A, T375S, based on amino acid sequence positions of hADAR2-D, and mutations in a homologous ADAR protein corresponding to the above. In one embodiment, the adenosine deaminase may comprise one or more of the mutations: E488Q, V351G, S486A, T375S, S370C, based on amino acid sequence positions of hADAR2-D, and mutations in a homologous ADAR protein corresponding to the above. In one embodiment, the adenosine deaminase may comprise one or more of the mutations: E488Q, V351G, S486A, T375S, S370C, P462A, based on amino acid sequence positions of hADAR2-D, and mutations in a homologous ADAR protein corresponding to the above. In one embodiment, the adenosine deaminase may comprise one or more of the mutations: E488Q, V351G, S486A, T375S, S370C, P462A, N597I, based on amino acid sequence positions of hADAR2-D, and mutations in a homologous ADAR protein corresponding to the above. In one embodiment, the adenosine deaminase may comprise one or more of the mutations: E488Q, V351G, S486A, T375S, S370C, P462A, N597I, L332I, based on amino acid sequence positions of hADAR2-D, and mutations in a homologous ADAR protein corresponding to the above. In one embodiment, the adenosine deaminase may comprise one or more of the mutations: E488Q, V351G, S486A, T375S, S370C, P462A, N597I, L332I, I398V, based on amino acid sequence positions of hADAR2-D, and mutations in a homologous ADAR protein corresponding to the above. In one embodiment, the adenosine deaminase may comprise one or more of the mutations: E488Q, V351G, S486A, T375S, S370C, P462A, N597I, L332I, I398V, K350I, based on amino acid sequence positions of hADAR2-D, and mutations in a homologous ADAR protein corresponding to the above. In one embodiment, the adenosine deaminase may comprise one or more of the mutations: E488Q, V351G, S486A, T375S, S370C, P462A, N597I, L3321, 1398V, K350I, M383L, based on amino acid sequence positions of hADAR2-D, and mutations in a homologous ADAR protein corresponding to the above. In one embodiment, the adenosine deaminase may comprise one or more of the mutations: E488Q, V351G, S486A, T375S, S370C, P462A, N597I, L332I, I398V, K350I, M383L, D619G, based on amino acid sequence positions of hADAR2-D, and mutations in a homologous ADAR protein corresponding to the above. In one embodiment, the adenosine deaminase may comprise one or more of the mutations: E488Q, V351G, S486A, T375S, S370C, P462A, N597I, L3321, 1398V, K350I, M383L, D619G, S582T, based on amino acid sequence positions of hADAR2-D, and mutations in a homologous ADAR protein corresponding to the above. In one embodiment, the adenosine deaminase may comprise one or more of the mutations: E488Q, V351G, S486A, T375S, S370C, P462A, N597I, L332I, I398V, K350I, M383L, D619G, S582T, V440I based on amino acid sequence positions of hADAR2-D, and mutations in a homologous ADAR protein corresponding to the above. In one embodiment, the adenosine deaminase may comprise one or more of the mutations: E488Q, V351G, S486A, T375S, S370C, P462A, N597I, L332I, I398V, K350I, M383L, D619G, S582T, V440I, S495N based on amino acid sequence positions of hADAR2-D, and mutations in a homologous ADAR protein corresponding to the above. In one embodiment, the adenosine deaminase may comprise one or more of the mutations: E488Q, V351G, S486A, T375S, S370C, P462A, N597I, L332I, I398V, K350I, M383L, D619G, S582T, V440I, S495N, K418E based on amino acid sequence positions of hADAR2-D, and mutations in a homologous ADAR protein corresponding to the above. In one embodiment, the adenosine deaminase may comprise one or more of the mutations: E488Q, V351G, S486A, T375S, S370C, P462A, N597I, L332I, I398V, K350I, M383L, D619G, S582T, V440I, S495N, K418E, S661T based on amino acid sequence positions of hADAR2-D, and mutations in a homologous ADAR protein corresponding to the above. In some examples, provided herein includes a mutated adenosine deaminase e.g., an adenosine deaminase comprising one or more mutations of E488Q, V351G, S486A, T375S, S370C, P462A, N597I, L332I, I398V, K350I, M383L, D619G, S582T, V440I, S495N, K418E, S661T, fused with a dead IscB polypeptide nuclease or IscB polypeptide nickase. In some examples, provided herein includes a mutated adenosine deaminase e.g., an adenosine deaminase comprising E488Q, V351G, S486A, T375S, S370C, P462A, N597I, L332I, I398V, K350I, M383L, D619G, S582T, V440I, S495N, K418E, and S661T, fused with a dead IscB polypeptide nuclease or IscB polypeptide nickase. In some examples, provided herein includes a mutated adenosine deaminase e.g., an adenosine deaminase comprising E488Q, V351G, S486A, T375S, S370C, P462A, N597I, L332I, I398V, K350I, M383L, D619G, S582T, V440I, S495N, K418E, S661T, and S375N fused with a dead IscB polypeptide nuclease or IscB polypeptide nickase.

[0406] In one embodiment, the adenosine deaminase may be a tRNA-specific adenosine deaminase or a variant thereof. In one embodiment, the adenosine deaminase may comprise one or more of the mutations: W23L, W23R, R26G, H36L, N37S, P48S, P48T, P48A, I49V, R51L, N72D, L84F, S97C, A106V, D108N, H123Y, G125A, A142N, S146C, D147Y, R152H, R152P, E155V, I156F, K157N, K161T, based on amino acid sequence positions of E. coli TadA, and mutations in a homologous deaminase protein corresponding to the above. In one embodiment, the adenosine deaminase may comprise one or more of the mutations: D108N based on amino acid sequence positions of E. coli TadA, and mutations in a homologous deaminase protein corresponding to the above. In one embodiment, the adenosine deaminase may comprise one or more of the mutations: A106V, D108N, based on amino acid sequence positions of E. coli TadA, and mutations in a homologous deaminase protein corresponding to the above. In one embodiment, the adenosine deaminase may comprise one or more of the mutations: A106V, D108N, D147Y, E155V, based on amino acid sequence positions of E. coli TadA, and mutations in a homologous deaminase protein corresponding to the above. In one embodiment, the adenosine deaminase may comprise one or more of the mutations: A106V, D108N, based on amino acid sequence positions of E. coli TadA, and mutations in a homologous deaminase protein corresponding to the above. In one embodiment, the adenosine deaminase may comprise one or more of the mutations: A106V, D108N, D147Y, E155V, L84F, H123Y, I156F, based on amino acid sequence positions of E. coli TadA, and mutations in a homologous deaminase protein corresponding to the above. In one embodiment, the adenosine deaminase may comprise one or more of the mutations: A106V, D108N, D147Y, E155V, L84F, H123Y, I156F, A142N, based on amino acid sequence positions of E. coli TadA, and mutations in a homologous deaminase protein corresponding to the above. In one embodiment, the adenosine deaminase may comprise one or more of the mutations: A106V, D108N, D147Y, E155V, L84F, H123Y, I156F, H36L, R51L, S146C, K157N, based on amino acid sequence positions of E. coli TadA, and mutations in a homologous deaminase protein corresponding to the above. In one embodiment, the adenosine deaminase may comprise one or more of the mutations: A106V, D108N, D147Y, E155V, L84F, H123Y, I156F, H36L, R51L, S146C, K157N, P48S, based on amino acid sequence positions of E. coli TadA, and mutations in a homologous deaminase protein corresponding to the above. In one embodiment, the adenosine deaminase may comprise one or more of the mutations: A106V, D108N, D147Y, E155V, L84F, H123Y, I156F, H36L, R51L, S146C, K157N, P48S, A142N, based on amino acid sequence positions of E. coli TadA, and mutations in a homologous deaminase protein corresponding to the above. In one embodiment, the adenosine deaminase may comprise one or more of the mutations: A106V, D108N, D147Y, E155V, L84F, H123Y, I156F, H36L, R51L, S146C, K157N, P48S, W23R, P48A, based on amino acid sequence positions of E. coli TadA, and mutations in a homologous deaminase protein corresponding to the above. In one embodiment, the adenosine deaminase may comprise one or more of the mutations: A106V, D108N, D147Y, E155V, L84F, H123Y, I156F, H36L, R51L, S146C, K157N, P48S, W23R, P48A, A142N, based on amino acid sequence positions of E. coli TadA, and mutations in a homologous deaminase protein corresponding to the above. In one embodiment, the adenosine deaminase may comprise one or more of the mutations: A106V, D108N, D147Y, E155V, L84F, H123Y, I156F, H36L, R51L, S146C, K157N, P48S, W23R, P48A, R152P, based on amino acid sequence positions of E. coli TadA, and mutations in a homologous deaminase protein corresponding to the above. In one embodiment, the adenosine deaminase may comprise one or more of the mutations: A106V, D108N, D147Y, E155V, L84F, H123Y, I156F, H36L, R51L, S146C, K157N, P48S, W23R, P48A, R152P, A142N, based on amino acid sequence positions of E. coli TadA, and mutations in a homologous deaminase protein corresponding to the above.

[0407] In some examples, the base editing systems may comprise an intein-mediated trans-splicing system that enables in vivo delivery of a base editor, e.g., a split-intein cytidine base editors (CBE) or adenine base editor (ABE) engineered to trans-splice. Examples of the such base editing systems include those described in Colin K. W. Lim et al., Treatment of a Mouse Model of ALS by In Vivo Base Editing, Mol Ther. 2020 Jan. 14. pii: S1525-0016(20)30011-3. doi: 10.1016/j.ymthe.2020.01.005; and Jonathan M. Levy et al., Cytosine and adenine base editing of the brain, liver, retina, heart and skeletal muscle of mice via adeno-associated viruses, Nature Biomedical Engineering volume 4, pages 97-110(2020), which are incorporated by reference herein in their entireties.

[0408] Examples of base editing systems include those described in International Patent Publication Nos. WO 2019/071048 (e.g. paragraphs [0933]-[0938]), WO 2019/084063 (e.g., paragraphs [0173]-[0186], [0323]-[0475], [0893]-[1094]), WO 2019/126716 (e.g., paragraphs [0290]-[0425], [1077]-[1084]), WO 2019/126709 (e.g., paragraphs [0294]-[0453]), WO 2019/126762 (e.g., paragraphs [0309]-[0438]), WO 2019/126774 (e.g., paragraphs [0511]-[0670]), Cox D B T, et al., RNA editing with CRISPR-Cas13, Science. 2017 Nov. 24; 358(6366):1019-1027; Abudayyeh 00, et al., A cytosine deaminase for programmable single-base RNA editing, Science 26 Jul. 2019: Vol. 365, Issue 6451, pp. 382-386; Gaudelli N M et al., Programmable base editing of A·T to G·C in genomic DNA without DNA cleavage, Nature volume 551, pages 464-471 (23 Nov. 2017); Komor A C, et al., Programmable editing of a target base in genomic DNA without double-stranded DNA cleavage. Nature. 2016 May 19; 533(7603):420-4; Jordan L. Doman et al., Evaluation and minimization of Cas9-independent off-target DNA editing by cytosine base editors, Nat Biotechnol (2020). doi.org/10.1038/s41587-020-0414-6; and Richter M F et al., Phage-assisted evolution of an adenine base editor with improved Cas domain compatibility and activity, Nat Biotechnol (2020). doi.org/10.1038/s41587-020-0453-z, which are incorporated by reference herein in their entireties and can be used to adapt to the IscB or CRISPR-associated IscB polypeptides.

### Prime Editing

[0409] In one embodiment, the present disclosure provides compositions and systems may comprise a IscB polypeptide or CRISPR-associated IscB polypeptide nuclease or a catalytically inactive form, one or more ωRNA or guide molecules, and a reverse transcriptase. The systems may be used to insert a donor polynucleotide to a target polynucleotide. In some examples, the composition or system comprises a catalytically inactive IscB polypeptide or CRISPR-associated IscB polypeptide nuclease, a reverse transcriptase associated with or otherwise capable of forming a complex with the IscB polypeptide or CRISPR-associated IscB polypeptide nuclease, and a ωRNA or guide molecule capable of forming a complex with the IscB polypeptide or CRISPR-associated IscB polypeptide nuclease and directing site-specific binding of the complex to a target sequence of a target polynucleotide, the ωRNA or guide molecule further comprising a donor sequence for insertion into the target polynucleotide.

[0410] In some cases, the catalytically inactive IscB polypeptide or CRISPR-associated IscB polypeptide nuclease may be a nickase, e.g., a DNA nickase. In some cases, the IscB polypeptide or CRISPR-associated IscB polypeptide nuclease has one or more mutations. In some examples, the IscB polypeptide or CRISPR-associated IscB polypeptide nuclease comprises mutations corresponding to the mutations in the RuvC or HNH nuclease.

[0411] The IscB polypeptide or CRISPR-associated IscB polypeptide nuclease may be associated with a reverse transcriptase. A reverse transcriptase domain may be a reverse transcriptase or a fragment thereof. In certain aspects, the reverse transcriptase is Human immunodeficiency virus (HIV) RT, Avian myoblastosis virus (AMV) RT, Moloney murine leukemia virus (M-MLV) RT a group II intron RT, a group II intron-like RT, or a chimeric RT. In an embodiment, the RT comprises modified forms of these RTs, such as, engineered variants of Avian myoblastosis virus (AMV) RT, Moloney murine leukemia virus (M-MLV) RT, or Human immunodeficiency virus (HIV) RT (see, e.g., Anzalone, et al., Search-and-replace genome editing without double-strand breaks or donor DNA, Nature. 2019 December; 576(7785):149-157).

[0412] In some examples, the compositions and systems may comprise the IscB or CRISPR-associated protein disclosed herein; a reverse transcriptase (RT) polypeptide connected to or otherwise capable of forming a complex with the IscB polypeptide or CRISPR-associated IscB polypeptide; and a ωRNA or guide molecule capable of forming a complex with the IscB polypeptide or CRISPR-associated IscB polypeptide and comprising: a ωRNA or guide sequence capable of directing site-specific binding of the IscB polypeptide or CRISPR-associated IscB polypeptide complex to a target sequence of a target polynucleotide; a 3′ binding site region capable of binding to a cleaved upstream strand of the target polynucleotide; and a RT template sequence encoding an extended sequence, wherein the extended sequence comprises a variant region and a 3′ homologous sequence capable of hybridization to the downstream cleaved strand of the target polynucleotide.

[0413] A reverse transcriptase domain may be a reverse transcriptase or a fragment thereof. A wide variety of reverse transcriptases (RT) may be used in alternative embodiments of the present invention, including prokaryotic and eukaryotic RT, provided that the RT functions within the host to generate a donor polynucleotide sequence from the RNA template. If desired, the nucleotide sequence of a native RT may be modified, for example using known codon optimization techniques, so that expression within the desired host is optimized. A reverse transcriptase (RT) is an enzyme used to generate complementary DNA (cDNA) from an RNA template, a process termed reverse transcription. Reverse transcriptases are used by retroviruses to replicate their genomes, by retrotransposon mobile genetic elements to proliferate within the host genome, by eukaryotic cells to extend the telomeres at the ends of their linear chromosomes, and by some non-retroviruses such as the hepatitis B virus, a member of the Hepadnaviridae, which are dsDNA-RT viruses. Retroviral RT has three sequential biochemical activities: RNA-dependent DNA polymerase activity, ribonuclease H, and DNA-dependent DNA polymerase activity. Collectively, these activities enable the enzyme to convert single-stranded RNA into double-stranded cDNA. In an embodiment, the RT domain of a reverse transcriptase is used in the present invention. The domain may include only the RNA-dependent DNA polymerase activity. In some examples, the RT domain is non-mutagenic, i.e., does not cause mutation in the donor polynucleotide (e.g., during the reverse transcriptase process). In some cases, In some examples, the RT domain may be non-retron RT, e.g., a viral RT or a human endogenous RTs. In some examples, the RT domain may be retron RT or DGRs RT. In some example, the RT may be less mutagenic than a counterpart wildtype RT. In one embodiment, the RT herein is not mutagenic.

[0414] The reverse transcriptase may be fused to the C-terminus of a IscB polypeptide or CRISPR-associated IscB polypeptide nuclease. Alternatively or additionally, the reverse transcriptase may be fused to the N-terminus of a IscB polypeptide or CRISPR-associated IscB polypeptide nuclease. The fusion may be via a linker and/or an adaptor protein. In some examples, the reverse transcriptase may be an M-MLV reverse transcriptase or variant thereof. The M-MLV reverse transcriptase variant may comprise one or more mutations. For the examples, the M-MLV reverse transcriptase may comprise D200N, L603W, and T330P. In another example, the M-MLV reverse transcriptase may comprise D200N, L603W, T330P, T306K, and W313F. In a particular example, the fusion of IscB polypeptide or CRISPR-associated IscB polypeptide nuclease and reverse transcriptase is IscB polypeptide or CRISPR-associated IscB polypeptide nuclease (with a mutation corresponding to H840A of SpCas9) fused with M-MLV reverse transcriptase (D200N+L603W+T330P+T306K+W313F).

[0415] In one embodiment, the IscB polypeptide or CRISPR-associated IscB polypeptide nuclease herein may target DNA using a ωRNA or guide RNA containing a binding sequence that hybridizes to the target sequence on the DNA. The ωRNA or guide RNA may further comprise an editing sequence that contains new genetic information that replaces target DNA nucleotides. The small sizes of the IscB polypeptide or CRISPR-associated IscB polypeptide nuclease herein may allow easier packaging and delivery of the prime editing system, e.g., with a viral vector, e.g., AAV or lentiviral vector.

[0416] A single-strand break (a nick) may be generated on the target DNA by the IscB polypeptide or CRISPR-associated IscB polypeptide nuclease at the target site to expose a 3′-hydroxyl group, thus priming the reverse transcription of an edit-encoding extension on the ωRNA or guide directly into the target site. These steps may result in a branched intermediate with two redundant single-stranded DNA flaps: a 5′ flap that contains the unedited DNA sequence, and a 3′ flap that contains the edited sequence copied from the hRNA. The 5′ flaps may be removed by a structure-specific endonuclease, e.g., FEN122, which excises 5′ flaps generated during lagging-strand DNA synthesis and long-patch base excision repair. The non-edited DNA strand may be nicked to induce bias DNA repair to preferentially replace the non-edited strand. Examples of prime editing systems and methods include those described in Anzalone A V et al., Search-and-replace genome editing without double-strand breaks or donor DNA, Nature. 2019 Oct. 21. doi: 10.1038/s41586-019-1711-4, which is incorporated by reference herein in its entirety.

[0417] The IscB polypeptide or CRISPR-associated IscB polypeptide (e.g., the nickase form) may be used to prime-edit a single nucleotide on a target DNA. Alternatively or additionally, the IscB polypeptide or CRISPR-associated IscB polypeptide nuclease may be used to prime-edit at least 2, at least 3, at least 4, at least 5, at least 6, at least 7, at least 8, at least 10, at least 11, at least 12, at least 13, at least 14, at least 15, at least 16, at least 17, at least 18, at least 19, at least 20, at least 21, at least 22, at least 23, at least 24, at least 25, at least 26, at least 27, at least 28, at least 29, at least 30, at least 40, at least 50, at least 60, at least 70, at least 80, at least 90, at least 100, at least 200, at least 300, at least 400, at least 500, at least 600, at least 700, at least 800, at least 900, or at least 1000 nucleotides on a target DNA.

[0418] In yet another embodiment, PRIME editing is used first to create a longer 3′ region (e.g. 20 nucleotides). Examples of prime editing systems and methods include those described in Anzalone A V et al., Search-and-replace genome editing without double-strand breaks or donor DNA, Nature. 2019 Oct. 21. doi: 10.1038/s41586-019-1711-4, which is incorporated by reference herein in its entirety. In such cases, the system comprises a IscB polypeptide or CRISPR-associated IscB polypeptide with nickase activity, a reverse transcriptase domain, and a DNA polymerase, and a ωRNA or guide molecule comprising a binding sequence capable of hybridizing to the target polynucleotide and a editing sequence. The generated region may be further extended on a DNA template as described herein. The latter may allow generation of a target-independent sequence, compatible with a generic donor sequence.

[0419] The IscB polypeptide or CRISPR-associated IscB polypeptide is capable of generating a first cleavage of in the target sequence and a second cleavage outside the target sequence on the target polynucleotide. In some variations, a second IscB polypeptide or CRISPR-associated IscB polypeptide-mediated cleavage in vicinity to the target site may be made, which may enable more efficient invasion of the extended DNA.

[0420] In some examples, the compositions and systems of the IscB polypeptide or CRISPR-associated IscB polypeptide herein comprise: a reverse transcriptase (RT) polypeptide connected to or otherwise capable of forming a complex with the IscB polypeptide or CRISPR-associated IscB polypeptide; a first ωRNA or guide molecule capable of forming a first IscB polypeptide or CRISPR-associated IscB polypeptide-Reverse transcriptase complex with the IscB polypeptide or CRISPR-associated IscB polypeptide and comprising: a ωRNA or guide sequence capable of directing site-specific binding of the first IscB polypeptide or CRISPR-associated IscB polypeptide-Reverse transcriptase complex to a first target sequence of a target polynucleotide; a first binding site region capable of binding to a cleaved or nicked strand of the target polynucleotide; and a RT template sequence encoding a first extended sequence; a second ωRNA or guide molecule capable of forming a second IscB polypeptide or CRISPR-associated IscB polypeptide-Reverse transcriptase complex with the IscB polypeptide or CRISPR-associated IscB polypeptide and comprising: a ωRNA or guide sequence capable of directing site specific binding of the second IscB polypeptide or CRISPR-associated IscB polypeptide-Reverse transcriptase complex to a second target sequence of the target polynucleotide; a second binding site region capable of binding to a cleaved or nicked strand of the target polynucleotide; and a RT template sequence encoding a second extended sequence.

[0421] In some cases, the compositions and systems may further comprise: a donor template; a third ωRNA or guide sequence capable of forming a IscB polypeptide or CRISPR-associated IscB polypeptide-Reverse transcriptase complex-ωRNA or guide with the IscB polypeptide or CRISPR-associated IscB polypeptide and comprising: a ωRNA or guide sequence capable of directing site-specific binding to a target sequence on the donor template; a third binding region capable of binding to a cleaved or nicked strand of the donor template; and a RT template encoding a third extended region complementary to the first extended region generated on the target polynucleotide: and a fourth ωRNA or guide sequence capable of forming a IscB polypeptide or CRISPR-associated IscB polypeptide-Reverse transcriptase complex with the IscB polypeptide or CRISPR-associated IscB polypeptide and comprising: a ωRNA or guide sequence capable of directing site-specific binding to a second target sequence on the donor template; a fourth binding region capable of binding to a cleaved or nicked strand of the donor template; and a RT template encoding a fourth extended region complementary to the second extended region generated on the target polynucleotide.

[0422] In some cases, the compositions and systems may further comprise a site-specific recombinase, and wherein the first and second extended regions are complementary to each other and introduce a serine integrase recombination site; and a donor molecule comprising a donor sequence for insertion into the target polypeptide and the complementary recombination site to the serine integrase recombination site.

[0423] In some examples, the compositions and systems may further comprise a recombinase. The recombinase is connected to or otherwise capable of forming a complex with the IscB polypeptide or CRISPR-associated IscB polypeptide. In an embodiment, the complex is capable of inserting a recombination site in the DNA loci of interest by extension of RT templates that encode for the recombination site on the 3′ extension of the ωRNA or guide sequences by the reverse transcriptase. In an embodiment, a donor template comprising a compatible recombination site is provided that can recombine unidirectionally with the inserted recombination site when a recombinase specific for the recombination site is also provided. In an embodiment, the donor template is a plasmid comprising the complementary recombination site and any sequence for insertion at the DNA loci of interest. In an embodiment, the recombinase is connected to or capable of forming a complex with the IscB polypeptide or CRISPR-associated IscB polypeptide nuclease, such that all of the enzymatic proteins are brought into contact at the loci of interest. In an embodiment, the recombinase is codon optimized for eukaryotic cells (described further herein). In an embodiment, the recombinase includes a NLS (described further herein). In an embodiment, the recombinase is provided as a separate protein. The separate recombinase may form a dimer and bind to the donor template recombination site. The recombinase may be targeted to the loci of interest as a result of the insertion of the compatible recombination site that is also recognized by the recombinase. Thus, the recombinase may recognize the recombination site inserted at the DNA loci of interest and the recombination site on the donor and be targeted to the DNA loci of interest without any additional modifications to the recombinase.

[0424] In an embodiment, a second IscB complex connected to a recombinase is targeted to the DNA loci of interest. In an embodiment, the second TnpB complex comprises a dead IscB protein (dIscB, described further herein), such that the recombinase is targeted to the DNA loci of interest, but the target sequence is not further cleaved. In an embodiment, the dIscB targets a sequence generated only after the insertion of the recombination site. In an embodiment, the recombinase recognizes and binds to the donor template recombination site and the inserted recombination site. In an embodiment, the recombinase forms a dimer with a recombinase provided as a separate protein.

[0425] As used herein, the term “Recombinase” refers to an enzyme that catalyzes recombination between two or more recombination sites (e.g., an acceptor and donor site). Recombinases useful in the present invention catalyze recombination at specific recombination sites which are specific polynucleotide sequences that are recognized by a particular recombinase. “Uni-directional recombinases” or “integrases” refer to recombinase enzymes whose recognition sites are destroyed after the recombination has taken place. The term “integrase” refers to a type of recombinase. In other words, the sequence recognized by the recombinase is changed into one that is not recognized by the recombinase upon recombination. As a result, once a sequence is subjected to recombination by the uni-directional recombinase, the continued presence of the recombinase cannot reverse the previous recombination event.

[0426] “Recombination sites” are specific polynucleotide sequences that are recognized by the recombinase enzymes described herein. Typically, two different sites are involved (in regards to recombination termed “complementary sites”), one present in the target nucleic acid (e.g., a chromosome or episome of a eukaryote) and another on the nucleic acid that is to be integrated at the target recombination site. The terms “attB” and “attP,” which refer to attachment (or recombination) sites originally from a bacterial target (attachment site of bacteria) and a phage donor (attachment site of phage), respectively, are used herein although recombination sites for particular enzymes may have different names. The two attachment sites can share as little sequence identity as a few base pairs. The recombination sites typically include left and right arms separated by a core or spacer region. Thus, an attB recombination site consists of BOB′, where B and B′ are the left and right arms, respectively, and O is the core region. Similarly, attP is POP′, where P and P′ are the arms and O is again the core region. Upon recombination between the attB and attP sites, and concomitant integration of a nucleic acid at the target, the recombination sites that flank the integrated DNA are referred to as “attL” and “aatR.” The attL and attR sites, using the terminology above, thus consist of BOP′ and POB′, respectively. In some representations herein, the “O” is omitted and attB and attP, for example, are designated as BB′ and PP′, respectively.

### Guided Excision-Transposition Systems

[0427] Embodiments disclosed herein provide an engineered or non-natural guided excision-transposition system. The engineered or non-natural guided excision-transposition system may comprise one or more components of a ωRNA-IscB or guide-CRISPR-associated IscB system and one or more components of a Class II transposon. The components of the ωRNA-IscB or guide-CRISPR-associated IscB system can direct the Class II transposon component(s) to retrotransposon to a target nucleic acid sequence and direct its transposition into a recipient polynucleotide.

[0428] For example, the engineered or non-natural guided excision-transposition systems that can include (a) a first IscB polypeptide or CRISPR-associated IscB polypeptide; (b) a first Class II transposon polypeptide coupled to or otherwise capable of complexing with the first IscB polypeptide or CRISPR-associated IscB polypeptide; (c) a first guide molecule capable of forming a first ωRNA-IscB or guide-CRISPR-associated IscB complex with the first IscB protein or CRISPR-associated IscB polypeptide and directing site-specific binding to a first target sequence of a first target polynucleotide; (d) a second IscB polypeptide or CRISPR-associated IscB polypeptide; (e) a second Class II transposon polypeptide coupled to or otherwise capable of complexing with the second IscB polypeptide or CRISPR-associated IscB polypeptide; (f) a second guide molecule capable of forming a second ωRNA-IscB complex with the first IscB protein and directing site-specific binding to a second target sequence of the first target polynucleotide; and (g) a Class II transposon polynucleotide comprising the first target polynucleotide and is capable of forming a complex with the first and second IscB polypeptide or CRISPR-associated IscB polypeptide, the first and second guide molecules, and the first and second Class II transposon polypeptides.

[0429] In one embodiment, the engineered or non-natural guided excision-transposition system can include (h) a third guide molecule capable of complexing with the first IscB polypeptide or CRISPR-associated IscB polypeptide and directing site-specific binding to a first target sequence of a second target polynucleotide, wherein the third guide molecule is optionally coupled to the first IscB polypeptide or CRISPR-associated IscB polypeptide; (i) optionally, a first ωRNA or guide molecule polynucleotide that encodes the third ωRNA or guide molecule; (j) a fourth ωRNA or guide molecule capable of complexing with the second IscB polypeptide or CRISPR-associated IscB polypeptide and directing site-specific binding to a second target sequence of the second target polynucleotide, wherein the fourth guide molecule is optionally coupled to the second IscB polypeptide or CRISPR-associated IscB polypeptide; and (k) optionally, a second ωRNA or guide molecule polynucleotide that encodes the fourth ωRNA or guide molecule.

[0430] In one embodiment, the first and the second Class II transposon polypeptides are capable of excising the first target polynucleotide from the Class II transposon polynucleotide. In one embodiment, the first and the second Class II transposon polypeptides are capable of transposing the first target polynucleotide in the second target polynucleotide. In one embodiment, the first target polynucleotide does not include one or more Class II transposon long terminal repeats.

[0431] The engineered or non-natural guided excision-transposition systems described herein can be based on a Class II transposon or Class II transposon system. The engineered or non-natural guided excision-transposition system may include a first target polynucleotide, also referred to as a donor polynucleotide or transposon and a second target polynucleotide, which is also referred to herein as a recipient polynucleotide. As used herein, “transposon” (also referred to as transposable element) refers to a polynucleotide sequence that is capable of moving form location in a genome to another. There are several classes of transposons. Transposons include retrotransposons (Class I transposons) and DNA transposons (Class II transposons). In some cases, retrotransposons require the transcription of the polynucleotide that is moved (or transposed) in order to transpose the polynucleotide to a new genome or polynucleotide. DNA transposons are those that do not require reverse transcription of the polynucleotide that is moved (or transposed) in order to transpose the polynucleotide to a new genome or polynucleotide.

[0432] Any suitable transposon system can be used. Suitable transposon and systems thereof can include, but are not limited, to Sleeping Beauty transposon system (Tc1/mariner superfamily) (see e.g. Ivics et al. 1997. Cell. 91(4): 501-510), piggyBac (piggyBac superfamily) (see e.g. Li et al. 2013 110(25): E2279-E2287 and Yusa et al. 2011. PNAS. 108(4): 1531-1536), Tol2 (superfamily hAT), Frog Prince (Tc1/mariner superfamily) (see e.g. Miskey et al. 2003 Nucleic Acid Res. 31(23):6873-6881) and variants thereof.

[0433] In one embodiment, the first and/or second Class II transposon polypeptide is a DD[E/D] transposon or transposon polypeptide. In one embodiment, the first and/or the second Class II transposon polynucleotide is a Tc1/mariner, PiggyBac, Frog Prince, Tn3, Tn5, hAT, CACTA, P, Mutator, PIF/Harbinger, Transib, or a Merlin/IS1016 transposon polynucleotide. In one embodiment, the first and/or second Class II transposon polypeptide is a Tc1/mariner, PiggyBac, Frog Prince, Tn3, Tn5, hAT, CACTA, P, Mutator, PIF/Harbinger, Transib, or a Merlin/IS1016 transposon polypeptide.

[0434] Suitable Class II transposon systems and components that can be utilized can also be and are not limited to those described in e.g. and without limitation, Han et al., 2013. BMC Genomics. 14:71, doi: 10.1186/1471-2164-14-71, Lopez and Garcia-Perez. 2010. Curr. Genomics. 11(2):115-128; Wessler. 2006. PNAS. 103(47): 176000-17601; Gao et al., 2017. Marine Genomics. 34:67-77; Bradic et al. 2014. Mobile DNA. 5(12) doi:10.1186/1759-8753-5-12; Li et al., 2013. PNAS. 110(25)E2279-E2287; Kebriaei et al. 2017. Trends in Genetics. 33(11): 852-870); Miskey et al. 2003. Nucleic Acid res. 31(23):6873-6881; Nicolas et al. 2015. Microbiol Spectr. 3(4) doi: 10.1128/microbiolspec.MDNA3-0060-2014); W. S. Reznikoff. 1993. Annu Rev. Microbiol. 47:945-963; Rubin et al. 2001. Genetics. 158(3): 949-957; Wicker et al. 2003. Plant Physiol. 132(1): 52-63; Majumdar and Rio. 2015. Microbiol. Spectr. 3(2) doi: 10.1128/microbiolspec.MDNA3-0004-2014; D. Lisch. 2002. Trends in Plant Sci. 7(11): 498-504; Sinzelle et al. 2007. PNAS. 105(12): 4715-4720; Han et al. 2014; Genome Biol. Evol. 6(7):1748-1757; Grzebelus et al. 2006; Mol. Genet. Genomics. 275(5):450-459; Zhang et al. 2004. Genetics. 166(2):971-986; Chen and Li. 2008. Gene. 408(1-2):51-63; and C. Feschotte. 2004. Mol. Biol. Evol. 21(9):1769-1780.

### Retrotransposons

[0435] The systems and compositions herein may comprise a IscB polypeptide or CRISPR-associated IscB polypeptide nuclease, one or more ωRNAs or guide RNAs, and one or more components of a retrotransposon, e.g., a non-LTR retrotransposon. The one or more components of a retrotransposon include a retrotransposon protein and retrotransposon RNA. The systems and compositions may be used to insert a donor polynucleotide to a target polynucleotide. The systems and compositions may further comprise a donor polynucleotide.

[0436] In some examples, the present disclosure provides an engineered, non-naturally occurring composition comprising: a IscB polypeptide or CRISPR-associated IscB polypeptide nuclease, a non-LTR retrotransposon protein associated with or otherwise capable of forming a complex with the IscB polypeptide or CRISPR-associated IscB polypeptide nuclease; a single ωRNA or guide capable of forming a complex with the IscB polypeptide or CRISPR-associated IscB polypeptide nuclease and directing site-specific binding to a target sequence of a target polynucleotide. The composition may further comprise a donor construct comprising a donor polynucleotide for insertion to the target polynucleotide and located between two binding elements capable of forming a complex with the non-LTR retrotransposon protein. In some cases, the IscB polypeptide or CRISPR-associated IscB polypeptide nuclease is engineered to have nickase activity.

[0437] In some examples, the IscB polypeptide or CRISPR-associated IscB polypeptide nuclease is fused to the N-terminus of the non-LTR retrotransposon protein. In some examples, the IscB polypeptide or CRISPR-associated IscB polypeptide nuclease is fused to the C-terminus of the non-LTR retrotransposon protein.

[0438] The guides may direct the fusion protein to a target sequence 5′ of the targeted insertion site, and wherein the IscB polypeptide or CRISPR-associated IscB polypeptide nuclease generates a double-strand break at the targeted insertion site. The guides may direct the fusion protein to a target sequence 3′ of the targeted insertion site, and wherein the IscB polypeptide or CRISPR-associated IscB polypeptide nuclease generates a double-strand break at the targeted insertion site.

[0439] The donor polynucleotide may further comprise a polymerase processing element to facilitate 3′ end processing of the donor polynucleotide sequence. The polymerase may be a DNA polymerase, e.g., DNA polymerase I. In some examples, the polymerase may be an RNA polymerase.

[0440] In some examples, the donor polynucleotide further comprises a homology region to the target sequence on the 5′ end of the donor construct, the 3′ end of the donor construct, or both. In some examples, the homology region is from 1 to 50, from 5 to 30, from 8 to 25, e.g., 1, 2, 3, 4, 5, 6, 7, 8, 9, 10, 11, 12, 13, 14, 15, 16, 17, 18, 19, 20, 21, 22, 23, 24, 25, 26, 27, 28, 29, 30, 31, 32, 33, 34, 35, 36, 37, 38, 39, 40, 41, 42, 43, 44, 45, 46, 47, 48, 49, or 50 base pairs in length.

[0441] Native or wild-type non-LTR retrotransposons encode the protein machinery necessary for their self-mobilization. The non-LTR retrotransposon element comprises a DNA element integrated into a host genome. This DNA element may encode one or two open reading frames (ORFs). For example, the R2 element of Bombyx mori encodes a single ORF containing reverse transcriptase (RT) activity and a restriction enzyme-like (REL) domain. L1 elements encode two ORFs, ORF1 and ORF2. ORF1 contains a leucine zipper domain involved in protein-protein interactions and a C-terminal nucleic acid binding domain. ORF2 has a N-terminal apurinic/apyrimidinic endonuclease (APE), a central RT domain, and a C-terminal cysteine histidine rich domain. An example replicative cycle of a non-LTR retrotransposon may comprise transcription of the full-length retrotransposon element to generate an mRNA active element (retrotransposon RNA). The active element mRNA is translated to generate the encoded retrotransposon proteins or polypeptides. A ribonucleoprotein complex comprising the active element and retrotransposon protein or polypeptide is formed and this RNP facilitates integration of the active element into the genome. The RNA-transposase complex nicks the genome. The 3′ end of the nicked DNA serves as a primer to allow the reverse transcription of the transposon RNA into cDNA. Fourth, the transposase proteins integrate the cDNA into the genome.

[0442] Elements of these systems may be engineered to work within the context of the invention. For example a non-LTR retrotransposon polypeptide may be fused to a site-specific nuclease. The binding elements that allow a non-LTR retrotransposon polypeptide to bind to the native retrotransposon DNA element, may be engineered into a donor construct to facilitate entry of a donor polynucleotide sequence into a target polypeptide.

[0443] In the present invention the protein component of the non-LTR retrotransposon may be connected to or otherwise engineered to form a complex with a site-specific nuclease. The retrotransposon RNA may be engineered to encode a donor polynucleotide sequence. Thus, in certain example embodiments, the IscB polypeptide nuclease, via formation of a IscB polypeptide nuclease complex with a guide sequence, directs the retrotransposon complex (e.g. the retrotransposon polypeptide(s) and retrotransposon RNA to a target sequence in a target polynucleotide, where the retrotransposon RNP complex facilitates integration of the donor polynucleotide sequence into the target polynucleotide. Accordingly, the one or more non-LTR retrotransposon components may comprise retrotransposon polypeptides, or function domains thereof, that facilitate binding of the retrotransposon RNA, reverse transcription of the retrotransposon RNA into cDNA, and/or integration of the donor polynucleotide into the target polynucleotide, as well as retrotransposon RNA elements modified to encode the donor polynucleotide sequence.

[0444] Examples of non-LTR retrotransposons include CRE, R2, R4, L1, RTE, Tad, R1, LOA, I, Jockey, CR1. In one example, the non-LTR retrotransposon is R2. In another example, the non-LTR retrotransposon is L1. Examples of non-LTR retrotransposons may include those described in Christensen S M et al., RNA from the 5′ end of the R2 retrotransposon controls R2 protein binding to and cleavage of its DNA target site, Proc Natl Acad Sci USA. 2006 Nov. 21; 103(47):17602-7; Eickbush T H et al, Integration, Regulation, and Long-Term Stability of R2 Retrotransposons, Microbiol Spectr. 2015 April; 3(2):MDNA3-0011-2014. doi: 10.1128/microbiolspec.MDNA3-0011-2014; Han J S, Non-long terminal repeat (non-LTR) retrotransposons: mechanisms, recent developments, and unanswered questions, Mob DNA. 2010 May 12; 1(1):15. doi: 10.1186/1759-8753-1-15; Malik H S et al., The age and evolution of non-LTR retrotransposable elements, Mol Biol Evol. 1999 June; 16(6):793-805, which are incorporated by reference herein in their entireties.

[0445] Examples of the non-LTR retrotransposon polypeptides also include R2 from Clonorchis sinensis, or Zonotrichia albicollis.

[0446] A non-LTR retrotransposon may comprise multiple retrotransposon polypeptides or polynucleotides encoding same. In one embodiment, the retrotransposon polypeptides may form a complex. For example, a non-LTR retrotransposon is a dimer, e.g., comprising two retrotransposon polypeptides forming a dimer. The dimer subunits may be connected or form a tandem fusion. A IscB polypeptide nuclease may be associate with (e.g., connected to) one or more subunits of such complex. In some examples, the non-LTR retrotransposon is a dimer of two retrotransposon polypeptides; one of the retrotransposon polypeptides comprises nuclease or nickase activity and is connected with a IscB polypeptide nuclease.

[0447] The retrotransposon polypeptides may comprise one or more modifications to, for example, enhance specificity or efficiency of donor polynucleotide recognition, target-primed template recognition (TPTR). The retrotransposon polypeptides may also comprise one or more truncations or excisions to remove domains or regions of wild-type protein to arrive at a minimal polypeptide that retain donor polynucleotide recognition and TPTR. In some example embodiments, the native endonuclease activity may be mutated to eliminate endonuclease activity.

[0448] In certain example embodiments, the modifications or truncations of the non-LTR retrotransposon peptide may be in a zinc finger region, a Myb region, a basic region, a reverse transcriptase domain, a cysteine-histidine rich motif, or an endonuclease domain.

[0449] A non-LTR retrotransposon may comprise polynucleotide encoding one or more retrotransposon RNA molecules. The polynucleotide may comprise one or more regulatory elements. The regulatory elements may be promoters. The regulatory elements and promoters on the polynucleotides include those described throughout this application. For example, the polynucleotide may comprise a pol2 promoter, a pol3 promoter, or a T7 promoter.

[0450] In some cases, the polynucleotide encodes a retrotransposon RNA with at least a portion of its sequence complementary to a target sequence. For example, the 3′ end of the retrotransposon RNA may be complementary to a target sequence. The RNA may be complementary to a portion of a nicked target sequence. In one embodiment, a retrotransposon RNA may comprise one or more donor polynucleotides. In certain cases, a retrotransposon RNA may encode one or more donor polynucleotides.

[0451] A retrotransposon RNA may be capable of binding to a retrotransposon polypeptide. Such retrotransposon RNA may comprise one or more elements for binding to the retrotransposon polypeptide. Examples of binding elements include hairpin structures, pseudoknots (e.g., a nucleic acid secondary structure containing at least two stem-loop structures in which half of one stem is intercalated between the two halves of another stem), stem loops, and bulges (e.g., unpaired stretches of nucleotides located within one strand of a nucleic acid duplex). In certain examples, the retrotransposon RNA comprises one or more hairpin structures. In some examples, the retrotransposon RNA comprises one or more pseudoknots. In certain examples, a retrotransposon RNA comprises a sequence encoding a donor polynucleotide and one or more binding elements for forming a complex with the retrotransposon polypeptide. The binding elements may be located on the 5′ end or the 3′ end.

[0452] In one embodiment, a retrotransposon RNA comprises a region capable of hybridizing with an overhang of a target polynucleotide at the target site. The overhang may be a stretch of single-stranded DNA. The overhang may function as a primer for reverse transcription of at least a portion of the retrotransposon RNA to a cDNA. In some cases, a region of the cDNA may be capable of hybridizing a second overhang of the target polynucleotide. The second overhang may function as a primer for the synthesis of a second strand to generate a double-stranded cDNA. The cDNA may comprise a donor polynucleotide sequence. The two overhangs may be from different strands of the target polynucleotide. Reverse Transcriptase Domain

[0453] The one or more functional domains may be one or more reverse transcriptase domains. In one embodiment, the systems comprise an engineered system for modifying a target polynucleotide comprising: a IscB polypeptide or CRISPR-associated IscB polypeptide or a variant thereof (e.g., dIscB); a reverse transcriptase (RT) domain; a RNA template comprising or encoding a donor polynucleotide to be inserted to a target sequence of the target polynucleotide; and an ωRNA or guide RNA molecule (i.e., a naturally single guide RNA molecule comprising a scaffold for reprogamming).

[0454] The reverse transcriptase may generate single-strand DNA based on the RNA template. The single-strand DNA may be generated by a non-retron, retron, or diversity generating retroelement (DGR). In some examples, the single-strand DNA may be generated from a self-priming RNA template. A self-priming RNA template may be used to generate a DNA without the need of a separate primer.

[0455] A reverse transcriptase domain may be a reverse transcriptase or a fragment thereof. A wide variety of reverse transcriptases (RT) may be used in alternative embodiments of the present invention, including prokaryotic and eukaryotic RT, provided that the RT functions within the host to generate a donor polynucleotide sequence from the RNA template. If desired, the nucleotide sequence of a native RT may be modified, for example using known codon optimization techniques, so that expression within the desired host is optimized. A reverse transcriptase (RT) is an enzyme used to generate complementary DNA (cDNA) from an RNA template, a process termed reverse transcription. Reverse transcriptases are used by retroviruses to replicate their genomes, by retrotransposon mobile genetic elements to proliferate within the host genome, by eukaryotic cells to extend the telomeres at the ends of their linear chromosomes, and by some non-retroviruses such as the hepatitis B virus, a member of the Hepadnaviridae, which are dsDNA-RT viruses. Retroviral RT has three sequential biochemical activities: RNA-dependent DNA polymerase activity, ribonuclease H, and DNA-dependent DNA polymerase activity. Collectively, these activities enable the enzyme to convert single-stranded RNA into double-stranded cDNA. In an embodiment, the RT domain of a reverse transcriptase is used in the present invention. The domain may include only the RNA-dependent DNA polymerase activity. In some examples, the RT domain is non-mutagenic, i.e., does not cause mutation in the donor polynucleotide (e.g., during the reverse transcriptase process). In some examples, the RT domain may be non-retron RT, e.g., a viral RT or a human endogenous RT. In some examples, the RT domain may be retron RT or DGRs RT. In some examples, the RT may be less mutagenic than a counterpart wildtype RT. In one embodiment, the RT herein is not mutagenic.

### Retrons

[0456] In an embodiment, a donor template for homologous recombination is generated by use of a self-priming RNA template for reverse transcription. A non-limiting example of a self-priming reverse transcription system is the retron system. By the term “retron” it is meant a genetic element which encodes components enabling the synthesis of branched RNA-linked single stranded DNA (msDNA) and a reverse transcriptase. Retrons which encode msDNA are known in the art, for example, but not limited to U.S. Pat. Nos. 6,017,737; 5,849,563; 5,780,269; 5,436,141; 5,405,775; 5,320,958; CA 2,075,515; all of which are herein incorporated by reference.

[0457] In an embodiment, the reverse transcriptase domain is a retron RT domain. In an embodiment, the RNA template encodes a retron RNA template that is recognized and reverse transcribed by the retron reverse transcriptase domain. Conserved across many bacterial species, retrons are highly efficient reverse transcription systems of relatively unknown function. The retron system consists of the retron RT protein, as well as the msr and msd transcripts, which function as the primer and template sequences, respectively. All components of the retron system are expressed from a single open reading frame as a single transcript including the msr-msd and encoding the retron RT protein (Lampson, et al., 2005, Retrons, msDNA, and the bacterial genome. Cytogenet Genome Res 110:491-499). The msr element ORF of a retron provides for the RNA portion of the msDNA molecule, while the msd element ORF provides for the DNA portion of the msDNA molecule. The primary transcript from the msr-msd region is thought to serve as both a template and a primer to produce the msDNA. Synthesis of msDNA is primed from an internal rG residue of the RNA transcript using its 2′-OH group. Modification of msd, or msr may also be made to permit insertion of a RNA template encoding a donor polynucleotide within the msd without altering the functioning of or the production of msDNA. The RNA template encoding a donor polynucleotide sequence may be any length but is preferably less than about 5 kb nucleotides, or also less than about 2 kb, or also less than 500 bases, provided that an msDNA product is produced.

### Diversity Generating Retroelements (DGRs)

[0458] In an embodiment, the one or more functional domains may be a diversity generating retroelement(s) (e.g., DGR described in US20100041033A1). In one embodiment, the DGR may insert a donor polynucleotide with its homing mechanism. For example, the DGR may be associated with a catalytically inactive IscB protein (e.g., a dead IscB), and integrate the single-strand DNA using a homing mechanism. In some examples, the DGR may be less mutagenic than a counterpart wild type DGR. In some examples, the DGR is not error-prone. In one embodiment, the DGR herein is not mutagenic. The non-mutagenic DGR may be a mutant of a wild type DGR. As used herein, the term “DGR” encompasses both diversity generating retroelement polynucleotides and proteins encoded by diversity generating retroelement polynucleotides. In some examples, DGR may be proteins encoded by diversity generating retroelement polynucleotides having reverse transcriptase activity. In some examples, DGR may be proteins encoded by diversity generating retroelement polynucleotides having reverse transcriptase activity and integrase activity. In some cases, the template or donor polynucleotide may be encoded by a diversity generating retroelement polynucleotide. In certain cases, the template may be a polynucleotide different from the diversity generating retroelement polynucleotide, e.g., provided as a separate construct or molecule.

[0459] In one embodiment, the DGR herein may also include a Group II intron (and any proteins and polynucleotides encoded), which are mobile ribozymes that self-splice from precursor RNAs to yield excised intron lariat RNAs, which then invade new genomic DNA sites by reverse splicing. Examples of Group II intron include those described in Lambowitz A M et al., Group II Introns: Mobile Ribozymes that Invade DNA, Cold Spring Harb Perspect Biol. 2011 August; 3(8): α003616.

[0460] In one embodiment, the diversity-generating retroelements (DGRs) are genetic elements that can produce targeted, massive variations in the genomes that carry these elements. In one embodiment, the DGR systems rely on error-prone reverse transcriptases to produce mutagenized cDNA (containing A-to-N mutations) from a template region (TR), to replace a segment called a variable region (VR) that is similar to the TR region—this process is called mutagenic retrohoming (see, e.g., Sharifi and Ye, MyDGR: a server for identification and characterization of diversity-generating retroelements. Nucleic Acids Res. 2019 Jul. 2; 47(W1): W289-W294). DGRs may include a unique family of retroelements that generate sequence diversity of DNA. They exist widely in bacteria, archaea, phage and plasmid, and benefit their hosts by introducing variations and accelerating the evolution of target proteins (see, e.g., Yan et al., Discovery and characterization of the evolution, variation and functions of diversity-generating retroelements using thousands of genomes and metagenomes. BMC Genomics. 2019; 20: 595). The first DGR was discovered in a Bordetella phage, BPP-1. Bordetella causes the respiratory infection in humans and many other mammals, controlled by the BvgAS signal transduction system. The surface of Bordetella is highly variable owing to the dynamic gene expression in the infectious cycle. The invasion of BPP-1 to Bordetella relies on the phage tail fiber protein Mtd. With the process of mutagenic reverse transcription and cDNA integration, DGR may introduce multiple nucleotide substitutions to Mtd gene and generates different receptor-binding molecules, thus making BPP-1 the ability to invade Bordetellae with diverse cell surfaces.

[0461] The systems may be used to generate an ssDNA donor using a retron- or DGR RT, which is then integrated by homologous recombination upon target cleavage or nicking using a IscB nuclease. In one embodiment, the systems may comprise DGRs and/or Group-II intron reverse transcriptases. The homing mechanism of DGRs or Group-II introns may be used in modifying a target polynucleotide. The DGRs or Group-II introns reverse transcriptase may be guided to a target polynucleotide by tethering to a nuclease-dead IscB nuclease, TALE, or ZF protein. In another embodiment, a non-retron/DGR reverse transcriptase (e.g. a viral RT) may be used for generating cDNA off of a self-priming RNA. In one embodiment, a ssDNA may be generated by an RT, but integrate it using a dead IscB polypeptide or CRISPR-associated IscB polypeptide, creating an accessible R-loop instead of nicking/cleaving.

### Topoisomerases

[0462] The one or more functional domains may be one or more topoisomerase domains. In one embodiment, an engineered system for modifying a target polynucleotide comprising: a IscB polypeptide or CRISPR-associated IscB polypeptide; a topoisomerase domain; and a nucleic acid template comprising or encoding a donor polynucleotide to be inserted to a target sequence of the target polynucleotide. In some examples, two or more of: the IscB polypeptide or CRISPR-associated IscB polypeptide; topoisomerase domain; and nucleic acid template may form a complex. In some examples, two or more of: the IscB polypeptide or CRISPR-associated IscB polypeptide; topoisomerase domain, may be comprised in a fusion protein.

[0463] Topoisomerases are a class of enzymes that modify the topological state of DNA via the breakage and rejoining of nucleic acid strands. In some cases, a topoisomerase may be a DNA topoisomerase, which is an enzyme that controls and alters the topologic states of DNA during transcription, and catalyzes the transient breaking and rejoining of a single strand of DNA which allows the strands to pass through one another, thus altering the topology of DNA.

[0464] In one embodiment, the topoisomerase domain is capable of ligating the donor polynucleotide with the target polynucleotide. The ligation may be achieved by sticky end or blunt end ligation. In an example, the donor polynucleotide may comprise an overhang comprising a sequence complementary to a region of the target polynucleotide. Examples of ligating the donor polynucleotide with the target polynucleotide include those of TOPO cloning, e.g., those described in “The Technology Behind TOPO Cloning,” at www.thermofisher.com/us/en/home/life-science/cloning/topo/topo-resources/the-technology-behind-topo-cloning.html.

[0465] In one embodiment, the topoisomerase domain may be associated with the donor polynucleotide. For example, the topoisomerase domain is covalently linked to the donor polynucleotide.

[0466] In one embodiment, a topoisomerase domain may be provided together with, e.g., associated (e.g., fused) with a IscB polypeptide or CRISPR-associated IscB polypeptide (e.g., a IscB polypeptide or CRISPR-associated IscB polypeptide or a variant thereof such as a dead IscB or a IscB nickase). Alternatively or additionally, the topoisomerase domain may be on a molecule different from the IscB polypeptide or CRISPR-associated IscB polypeptide. In some cases, the topoisomerase domain may be associated with a donor polynucleotide. For example, the topoisomerase domain may be pre-loaded covalently with a donor DNA molecule. Such design may allow for efficient ligation of only a specific cargo. The topoisomerase domain may ligate the donor polynucleotide (e.g., a DNA molecule) to a target site on a target polynucleotide (e.g., a free double-stranded DNA end). In one embodiment, the donor polynucleotide may have an overhang that comprises a sequence complementary to a region of the target polynucleotide. For example, the overhang may invade into the target polynucleotide at a cut site generated by the IscB polypeptide or CRISPR-associated IscB polypeptide.

[0467] Examples of topoisomerases include type I, including type IA and type IB topoisomerases, which cleave a single strand of a double-stranded nucleic acid molecule, and type II topoisomerases (e.g., gyrases), which cleave both strands of a double-stranded nucleic acid molecule.

[0468] Type IA and IB topoisomerases cleave one strand of a double-stranded nucleic acid molecule. In some examples, the cleavage of a double-stranded nucleic acid molecule by type IA topoisomerases generates a 5′ phosphate and a 3′ hydroxyl at the cleavage site, with the type IA topoisomerase covalently binding to the 5′ terminus of a cleaved strand. Cleavage of a double-stranded nucleic acid molecule by type IB topoisomerases may generate a 3′ phosphate and a 5′ hydroxyl at the cleavage site, with the type IB topoisomerase covalently binding to the 3′ terminus of a cleaved strand.

[0469] Examples of Type IA topoisomerases include E. coli topoisomerase I, E. coli topoisomerase III, eukaryotic topoisomerase II, archeal reverse gyrase, yeast topoisomerase III, Drosophila topoisomerase III, human topoisomerase III, Streptococcus pneumoniae topoisomerase III, and the like, including other type IA topoisomerases. A DNA-protein adduct is formed with the enzyme covalently binding to the 5′-thymidine residue, with cleavage occurring between the two thymidine residues.

[0470] Examples of Type IB topoisomerases include the nuclear type I topoisomerases present in all eukaryotic cells and those encoded by Vaccinia and other cellular poxviruses. The eukaryotic type IB topoisomerases are exemplified by those expressed in yeast, Drosophila and mammalian cells, including human cells. Viral type IB topoisomerases are exemplified by those produced by the vertebrate poxviruses (Vaccinia, Shope fibroma virus, ORF virus, fowlpox virus, and molluscum contagiosum virus), and the insect poxvirus (Amsacta moorei entomopoxvirus).

[0471] Examples of Type II topoisomerases include, bacterial gyrase, bacterial DNA topoisomerase IV, eukaryotic DNA topoisomerase II, and T-even phage encoded DNA topoisomerases. Type II topoisomerases may have both cleaving and ligating activities. Substrate double-stranded nucleic acid molecules of type II topoisomerase can be prepared such that the type II topoisomerase can form a covalent linkage to one strand at a cleavage site. For example, calf thymus type II topoisomerase can cleave a substrate ds nucleic acid molecule containing a 5′ recessed topoisomerase recognition site positioned three nucleotides from the 5′ end, resulting in dissociation of the three nucleic acid molecule 5′ to the cleavage site and covalent binding of the topoisomerase to the 5′ terminus of the ds nucleic acid molecule. Furthermore, upon contacting such a type II topoisomerase-charged ds nucleic acid molecule with a second nucleic acid molecule containing a 3′ hydroxyl group, the type II topoisomerase can ligate the sequences together, and then is released from the recombinant nucleic acid molecule.

[0472] In some examples, the topoisomerase is DNA topoisomerase I, e.g., a Vaccinia virus topoisomerase I. The topoisomerase may be pre-loaded with a donor polynucleotide. The Vaccinia virus topoisomerase may need a target comprising a 5′ —OH group.

### Phosphatases

[0473] The systems herein may further comprise a phosphatase domain. A phosphatase is an enzyme capable of removing a phosphate group from a molecule e.g., a nucleic acid such as DNA. Examples of phosphatases include calf intestinal phosphatase, shrimp alkaline phosphatase, Antarctic phosphatase, and APEX alkaline phosphatase.

[0474] In some examples, the 5′ —OH group of in the target polynucleotide may be generated by a phosphatase. A topoisomerase compatible with a 5′ phosphate target may be used to generate stable loaded intermediates. In some cases, a IscB polypeptide or CRISPR-associated IscB polypeptide nuclease that leaves a 5′ OH after cleaving the target polynucleotide may be used. In some cases, the phosphatase domain may be associated with (e.g., fused to) the IscB protein. The phosphatase domain may be capable of generating a —OH group at a 5′ end of the target polynucleotide. The phosphatase may be delivered separated from other components in the system, e.g., as a separate protein, on a separate vector from other components.

### Polymerases

[0475] The systems herein may further comprise a polymerase domain. A polymerase refers to an enzyme that synthesizes chains of nucleic acids. The polymerase may be a DNA polymerase or an RNA polymerase.

[0476] In one embodiment, the systems comprise an engineered system for modifying a target polynucleotide comprising: a IscB polypeptide or CRISPR-associated IscB polypeptide; a DNA polymerase domain; and a DNA template comprising a donor polynucleotide to be inserted to a target sequence of the target polynucleotide. In some examples, two or more of: the IscB protein; DNA polymerase domain; and DNA template may form a complex. In some examples, two or more of: the IscB protein; DNA polymerase domain; are comprised in a fusion protein. For example, the IscB polypeptide or CRISPR-associated IscB polypeptide and DNA polymerase domain may be comprised in a fusion protein.

[0477] In one embodiment, the systems may comprise a IscB polypeptide or CRISPR-associated IscB polypeptide nuclease (or variant thereof such as a dIscB polypeptide or CRISPR-associated IscB polypeptide or IscB polypeptide or CRISPR-associated IscB polypeptide nickase) and a DNA polymerase (e.g. phi29, T4, T7 DNA polymerase). The systems may further comprise a single-stranded DNA or double-stranded DNA template. The DNA template may comprise i) a first sequence homologous to a target site of the IscB protein on the target polynucleotide, and/or ii) a second sequence homologous to another region of the target polynucleotide. In one embodiment, the template may be a synthetic single-stranded or PCR-generated DNA molecule, (optionally end-protected by modified nucleotides), or a viral genome (e.g. AAV). In another embodiment, the template is generated using a reverse transcriptase. When the system is delivered into a cell, an endogenous DNA polymerase in the cell may be used. Alternatively or additionally, an exogenous DNA polymerase may be expressed in the cell.

[0478] The DNA template may be end-protected by one or more modified nucleotides, or comprises a portion of a viral genome. In some embodiment, the DNA template comprises LNA or other modifications (e.g., at the 3′ end). The presence of LNA and/or the modifications may lead to more efficient annealing with the 3′ flap generated by IscB polypeptide or CRISPR-associated IscB polypeptide cleavage.

[0479] Examples of DNA polymerase include Taq, Tne (exo −), Tma (exo −), Pfu (exo −), Pwo (exo −), Thermoanaerobacter thermohydrosulfuricus DNA polymerase, Thermococcus litoralis DNA polymerase I, E. coli DNA polymerase I, Taq DNA polymerase I, Tth DNA polymerase I, Bacillus stearothermophilus (Bst) DNA polymerase I, E. coli DNA polymerase III, bacteriophage T5 DNA polymerase, bacteriophage M2 DNA polymerase, bacteriophage T4 DNA polymerase, bacteriophage T7 DNA polymerase, bacteriophage phi29 DNA polymerase, bacteriophage PRD1 DNA polymerase, bacteriophage phi15 DNA polymerase, bacteriophage phi21DNA polymerase, bacteriophage PZE DNA polymerase, bacteriophage PZA DNA polymerase, bacteriophage Nf DNA polymerase, bacteriophage M2Y DNA polymerase, bacteriophage B103 DNA polymerase, bacteriophage SF5 DNA polymerase, bacteriophage GA-1 DNA polymerase, bacteriophage Cp-5 DNA polymerase, bacteriophage Cp-7 DNA polymerase, bacteriophage PR4 DNA polymerase, bacteriophage PR5 DNA polymerase, bacteriophage PR722 DNA polymerase and bacteriophage L17 DNA polymerase.

### Ligases

[0480] In general, the systems comprise a IscB polypeptide or CRISPR-associated IscB polypeptide and a ligase associated with the IscB protein. The IscB polypeptide or CRISPR-associated IscB polypeptide may be recruited to the target sequence by an ωRNA or guide RNA, and generate a break on the target sequence. The ωRNA or guide RNA may further comprise a template sequence with desired mutations or other sequence elements. The template sequence may be ligated to the target sequence to introduce the mutations or other sequence elements to the nucleic acid molecule. The IscB polypeptide or CRISPR-associated IscB polypeptide may be a nickase that generates a single-strand break on nucleic acid molecule, and the ligase may be a single-strand DNA ligase. In one embodiment, the systems comprise a pair of IscB polypeptide or CRISPR-associated IscB polypeptide-ligases complexes with two distinct ωRNA sequences. Each IscB polypeptide or CRISPR-associated IscB polypeptide-ligase complex can target one strand of a double-stranded polynucleotide, and work together to effectively modify the sequence of the double-stranded polynucleotides.

[0481] In some examples, the IscB polypeptide or CRISPR-associated IscB polypeptide is associated with a ligase or functional fragment thereof. The ligase may ligate a single-strand break (a nick) generated by the IscB polypeptide or CRISPR-associated IscB polypeptide. In certain cases, the ligase may ligate a double-strand break generated by the IscB polypeptide or CRISPR-associated IscB polypeptide. In certain examples, the IscB polypeptide or CRISPR-associated IscB polypeptide is associated with a reverse transcriptase or functional fragment thereof.

[0482] The present invention further provides systems and methods of modifying a nucleic acid sequence using a pair of distinct IscB polypeptide or CRISPR-associated IscB polypeptide-ligase-ωRNA or guide RNA complexes, said systems and methods comprising: (a) an engineered IscB polypeptide or CRISPR-associated IscB polypeptide connected to or complexed with a ligase; (b) two distinct ωRNA or guide RNA sequences complexed with such IscB polypeptide or CRISPR-associated IscB polypeptide-ligase protein complex to form a first and a second distinct IscB-ligase ωRNA complexes; (c) the first IscB-ligase-ωRNA or guide RNA complex binding to one strand of a target double-stranded polynucleotide sequence, and the second IscB polypeptide or CRISPR-associated IscB polypeptide-ligase-ωRNA or guide RNA complex binding to another strand of the target double-stranded polynucleotide sequence; (d) upon binding of the said complexes to the locus of interest the effector protein induces the modification of the sequences associated with or at the target locus of interest, whereby the two IscB polypeptide or CRISPR-associated IscB polypeptide-ligase-ωRNA or guide RNA complexes work together on different strands of the double-stranded target sequence and modify the sequence.

[0483] One of the advantages of using such a “pair” of IscB polypeptide or CRISPR-associated IscB polypeptide-ligase-ωRNA or guide RNA complexes includes high efficiency in modifying the sequence associated with or at the locus of interest of target double-stranded polynucleotides.

[0484] In one embodiment, the IscB polypeptide or CRISPR-associated IscB polypeptide can be a nickase. In a preferred embodiment, a ligase is linked to the IscB polypeptide or CRISPR-associated IscB polypeptide. The ligase can ligate the donor sequence to the target sequence. The ligase can be a single-strand DNA ligase or a double-strand DNA ligase. The ligase can be fused to the carboxyl-terminus of a IscB polypeptide or CRISPR-associated IscB polypeptide, or to the amino-terminus of a IscB polypeptide or CRISPR-associated IscB polypeptide.

[0485] As used herein the term “ligase” refers to an enzyme, which catalyzes the joining of breaks (e.g., double-stranded breaks or single-stranded breaks (“nicks”) between adjacent bases of nucleic acids. For example, a ligase may be an enzyme capable of forming intra- or inter-molecular covalent bonds between a 5′ phosphate group and a 3′ hydroxyl group. The term “ligate” refers to the reaction of covalently joining adjacent oligonucleotides through formation of an internucleotide linkage.

[0486] DNA ligases fall into two general categories: ATP-dependent DNA ligases (EC 6.5.1.1), and NAD (+) dependent DNA ligases (EC 6.5.1.2). NAD (+) dependent DNA ligases are found only in bacteria (and some viruses) while ATP-dependent DNA ligases are ubiquitous. The ATP-dependent DNA ligases can be divided into four classes: DNA ligase I, II, III, and IV. DNA ligase I links Okazaki fragments to form a continuous strand of DNA; DNA ligase II is an alternatively spliced form of DNA ligase III, found only in non-dividing cells; DNA ligase III is involved in base excision repair; and DNA ligase IV is involved in the repair of DNA double-strand breaks by non-homologous end joining (NHEJ). Amongst all ligases, there are two types of prokaryotic and one type of eukaryotic ligases that are particularly well suited for facilitating the blunt-ended, double-stranded DNA ligation: Prokaryotic DNA ligases (T3 and T4) and Eukaryotic DNA ligase (Ligase 1).

[0487] In some cases, the ligase is specific for double-stranded nucleic acids (e.g., dsDNA, dsRNA, RNA/DNA duplex). An example of a ligase specific for double-stranded DNA and DNA/RNA hybrids is T4 DNA ligase. In some cases, the ligase is specific for single-stranded nucleic acids (e.g., ssDNA, ssRNA). An example of such ligase is CircLigase II. In some cases, the ligase is specific for RNA/DNA duplexes. In some cases, the ligase is able to work on single-stranded, double-stranded, and/or RNA/DNA nucleic acids in any combination.

[0488] In some cases, the ligase may be a pan-ligase, which is a single ligase with the ability to ligate both DNA and RNA targets. The ligase may be specific for a target (e.g., DNA-specific or RNA-specific). In some cases, the ligase may be a dual ligase system that include DNA-specific, RNA-specific, and/or pan-ligases, in any combination.

[0489] Examples of ligases that can be used with the disclosure include T4 DNA Ligase, T3 DNA Ligase, T7 DNA Ligase, E. coli DNA Ligase, HiFi Taq DNA Ligase, 9° N™ DNA Ligase, Taq DNA Ligase, SplintR® Ligase (also known as. PBCV-1 DNA Ligase or Chlorella virus DNA Ligase), Thermostable 5′ AppDNA/RNA Ligase, T4 RNA Ligase, T4 RNA Ligase 2, T4 RNA Ligase 2 Truncated, T4 RNA Ligase 2 Truncated K227Q, T4 RNA Ligase 2, Truncated KQ, RtcB Ligase (joins single stranded RNA with a 3″-phosphate or 2′,3′-cyclic phosphate to another RNA), CircLigase II, CircLigase ssDNA Ligase, CircLigase RNA Ligase, or Ampligase® Thermostable DNA Ligas, NAD-dependent ligases including Taq DNA ligase, Thermus filiformis DNA ligase, Escherichia coli DNA ligase, Tth DNA ligase, Thermus scotoductus DNA ligase (I and II), thermostable ligase, Ampligase thermostable DNA ligase, VanC-type ligase, 9° N DNA Ligase, Tsp DNA ligase, and novel ligases discovered by bioprospecting; ATP-dependent ligases including T4 RNA ligase, T4 DNA ligase, T3 DNA ligase, T7 DNA ligase, Pfu DNA ligase, DNA ligase I, DNA ligase III, DNA ligase IV, and novel ligases discovered by bioprospecting, and wild-type, mutant isoforms, and genetically engineered variants thereof. In a particular example, the ligase is a

[0490] In one embodiment, the examples of the ligases include those used in sequencing by synthesis or sequencing by ligation reactions.

### Helitrons

[0491] The systems and compositions herein may comprise a IscB polypeptide or CRISPR-associated IscB polypeptide nuclease, one or more ωRNAs or guide RNAs, and one or more components of a helitron. The systems and compositions may be used to insert a donor polynucleotide to a target polynucleotide. The systems and compositions may further comprise a donor polynucleotide.

[0492] The term “helitron”, as used herein, refers to a polynucleotide (or nucleic acid segment), recognized as a transposon that captures and mobilizes gene fragments in eukaryotes. The term “helitron” as used herein refers to transposase that comprises an endonuclease domain and a C-terminal helicase domain. Helitrons are rolling-circle RNA transposons. In one embodiment, the helitron encodes a 1400 to about 2000 amino acid, or about 1800 amino acid multidomain transposase. In embodiments, the helitron comprises a hairpin near the 3′end to function as a transposition terminator. In embodiments, the transposon comprises a RepHel motif comprising a replication initiator (Rep) and a DNA helicase (hel) domain. See, Thomas J. & Pritham E. J. Helitrons, the eukaryotic rolling-circle transposable elements. Microbiol. Spectr. 3, 893-926 (2015). In embodiments, the helitron comprises a Rep nuclease domain and C-terminal helicase domain and inserts between an AT dinucleotide in single strand DNA. In an aspect, the C-terminal helicase unwinds the DNA in a 5′ to 3′ direction. The HUH nuclease domain may comprise one or two active site tyrosine residues, in embodiments, is a 2 Tyrosine (Y2) HUH endonuclease domain. Helitrons can encompass helentron, proto-helentron and helitron2 type proteins, structures of which can be as described in Thomas et al., 2015 at FIGS. 1 and 3, incorporated specifically by reference. Particular organisms in which the helitron or helentrons have been found can include those in Table 1 of Thomas J. & Pritham E. J. Helitrons, the eukaryotic rolling-circle transposable elements. Microbiol. Spectr. 3, 893-926 (2015), incorporated herein by reference. Similarly, helitrons can be identified based at least in part on the Rep motif, and conserved residues in the helitrons, and according to the alignment sequence of FIG. 2 of Thomas J. & Pritham E. J. Helitrons, the eukaryotic rolling-circle transposable elements. Microbiol. Spectr. 3, 893-926 (2015), specifically incorporated herein by reference.

[0493] The expression “helitron reaction” used herein refers to a reaction wherein a transposase inserts a donor polynucleotide sequence in or adjacent to an insertion site on a target polynucleotide. The insertion site may contain a sequence or secondary structure recognized by the helitron and/or an insertion motif sequence in the target polynucleotide into which the donor polynucleotide sequence may be inserted.

[0494] As described in Grabundzija 2018, the helitron terminal sequences contains a distinct ˜150 base pairs (bp) long sequence with an absolutely conserved dinucleotide at the end of left terminal sequence (LTS), and a tetranucleotide at the end of right terminal sequence (RTS) which is preceded by a palindromic sequence that can form a hairpin structure. Grabundzija et al., Nat. Commun. 2018; 9: 1278; doi:10.1035/s41467-018-03688-w.

[0495] The helitron end sequences may be responsible for identifying the donor polynucleotide for transposition. The helitron end sequences may be the DNA sequences used to perform a transposition reaction, the end sequences may be referred to herein as right terminal sequences and left terminal sequence. The donor polynucleotide can be configured to comprise a first and second helitron recognition sequence that are at least 80%, 85%, 90%, 95% 96%, 97%, 98%, 99% or 100% complementary to a left terminal sequence and/or a right terminal sequence of a polynucleotide encoding the helitron polypeptide.

[0496] In an aspect, the palindromic sequence may be located upstream of the right terminal sequence, for example, about 5, 10, 15, 20, 25, 30, 35 nucleotides upstream of the right terminal sequence end, or about 10 to 15 nucleotides upstream of the right terminal sequence end, about 10 to 12 nucleotides or about 11 nucleotides upstream of the right terminal sequence end. Ivana Grabundzija, Nat Commun. 2016; 7:10716, doi:10.1038/ncomms10716, incorporated herein by reference.

[0497] Exemplary helitrons can be identified using software, for example (EAHelitron) that has been used to identify Helitrons in a wide range of plant genomes. See, Hu, K., Xu, K., Wen, J. et al. Helitron distribution in Brassicaceae and whole Genome Helitron density as a character for distinguishing plant species. BMC Bioinformatics 20, 354 (2019). doi: 10.1186/s12859-019-2945-8, incorporated herein by reference.

[0498] The helitron may be derived from a eukaryote. In an aspect, the helitron is derived from a mammalian genome, in an aspect, vespertilionid bats, e.g. Helibat. In embodiments, the helitron is derived from derived from a Helibat1 transposon. In embodiments, the helitron is Helraiser, the full DNA sequence of the consensus transposon, including left terminal and right terminal sequences as well as hairpin identified is provided in Grabundzija, 2016 at Supplementary FIG. 1, specifically incorporated herein by reference. In an aspect, the helitron is flanked by left and right terminal sequences of the transposon. In an aspect, the left terminal sequence and right terminal sequence terminates with the conserved 5′-TC/CTAG-3′ motif. In an embodiment, the helitron may comprise a palindromic sequence that is about 10 to about 35, or about 5-25 bp or about 19-bp-long palindromic sequence with the potential to form a hairpin structure.

[0499] Elements of these systems may be engineered to work within the context of the invention. For example, a helitron polypeptide may be fused to a polypeptide capable of generating an R-loop. Fusion may be by any appropriate linker, in an exemplary embodiment, XTEN16. The binding elements that allow a helitron polypeptide to bind, for example, the use of sequences complementary to the right terminal sequence and the left terminal sequence of the helitron may be engineered into a donor construct to facilitate entry of a donor polynucleotide sequence into a target polynucleotide.

[0500] In certain example embodiments, the Isc polypeptide, via formation of complex with a hRNA sequence, directs the helitron polypeptide to a target sequence in a target polynucleotide, where the helitron facilitates integration of a donor polynucleotide sequence into the target polynucleotide.

[0501] The helitron polypeptides may also comprise one or more truncations or excisions to remove domains or regions of wild-type protein to arrive at a minimal polypeptide, alter functionality according to the system in which the helitron is used, or mutated to enhance or diminish particular activities associated with the helitron, i.e. nuclease activity or helicase activity.

### ISCB or Crispr-Associated ISCB Recombinase

[0502] The systems and compositions herein may comprise a IscB polypeptide or CRISPR-associated IscB polypeptide system, and one or more components of a recombinase. In an aspect, the IscB polypeptide or CRISPR-associated IscB polypeptide is naturally catalytically inactive and utilized with one or more nucleic acid components to provide site-specific targetings, and the one or more components of the recombinase to introduce a modification. In an aspect, the IscB polypeptide or CRISPR-associated IscB polypeptide polypeptide may be catalytically inactivated via mutation of one or more residues of a catalytic domain or via truncation, and utilized with one or more RNA components to provide site-specific targeting, and the one or more components of the recombinase introduce a modification. In an aspect, the IscB polypeptide or CRISPR-associated IscB polypeptide may be catalytically inactivated, and utilized with one or more RNA components to provide site-specific targeting, with the one or more components of the recombinase introduce a modification. In preferred embodiments, the recombinatise mediates unidirectional site-specific recombination. In one embodiment, the recombinase is a serine recombinase (SR), encoded, for example, by IS607 family, Tn4451, and bacteriophage phiC31. See, generally, Smith M C, Thorpe H M: Diversity in the serine recombinases. Mol Microbiol. 2002, 44: 299-307. 10.1046/j.1365-2958.2002.02891.x; Li et al., (2018) J. Mol. Biol. 430:21, 4401-4418. In an embodiment, the recombinase is a tyrosine recombinase (YR) encoded by IS91, Helitron, IS200/IS605, Crypton or DIRS-retrotransposon families. See, generally, Goodwin T J, Butler M I, Poulter R T: Cryptons: a group of tyrosine-recombinase-encoding DNA transposons from pathogenic fungi. Microbiology. 2003, 149: 3099-3109. Doi:10.1099/mic.0.26529-0; Cappello J, Handelsman K, Lodish H F: Sequence of Dictyostelium DIRS-1: an apparent retrotransposon with inverted terminal repeats and an internal circle junction sequence. Cell. 1985, 43: 105-115. 10.1016/0092-8674(85)90016-9. In an aspect, the recombinase provides site-specific integration of a template that can be provided with the composition, e.g. a donor oligonucleotide. Without being bound by theory, the recombinase allows for integration independent of payload size and can coordinate strand exchange and re-ligation across multiple cell types, allowing integration of long stretches of polynucleotides. In an exemplary embodiment, the serine recombinase is PhiC31 and the target is DNA. In an aspect, the phiC31 allows for integration of a target site comprising an attP or pseudoattP recognition site. See, e.g. systembio.com/wp-content/uploads/phiC31_productsheet-1.pdf. In an embodiment utilizing phiC231, a donor oligonucleotide would be provided with an attB at sequence that facilitates attachment at the attP site of the target genome. Similar approaches of designing donor oligonucleotides with sequences complementary to attachment sites for a recombinase can be designed for use with the present invention. See, e.g. Li et al., (2018) J. Mol. Biol. 430:21, 4401-4418.

[0503] In one embodiment, a naturally inactive IscB is provided with an IS630 transposon. IS630 transposons comprise the DDE motif, which is an RNase H-like fold that draws three catalytically active residues DDE signature and average about 1100 bp in length. See, Gao, B., Wang, Y., Diaby, M. et al. Evolution of pogo, a separate superfamily of IS630-Tc1-mariner transposons, revealing recurrent domestication events in vertebrates. Mobile DNA 11, 25 (2020) doi: 10.1186/s13100-020-00220-0. In an aspect, the IS630 transposon provides high target specificity inserting into a TA dinucleotide. In an aspect, the insertion is at a 5′-NTAN-3′.

### Systems and Complexes

[0504] In one aspect, the present disclosure provides nucleic acid-targeting systems. Such systems may be used to target, modify, and otherwise manipulate a nucleic acid. In one embodiment, the systems comprise the IscB polypeptide or CRISPR-associated IscB polypeptide nuclease and one or more ωRNAs or guide RNAs. The IscB polypeptide or CRISPR-associated IscB polypeptide nuclease may have nuclease activity, e.g., capable of cleaving DNA or RNA. The IscB polypeptide or CRISPR-associated IscB polypeptide nuclease may have nickase activity, e.g., capable of generating a single-strand break on a double-strand nucleic acid such as dsDNA or dsRNA. The IscB polypeptide or CRISPR-associated IscB polypeptide nuclease may be in a dead form, e.g., has nickase activity, or does not have nuclease or nickase activity. In one embodiment, the systems further comprising one or more functional domains, e.g., nucleotide deaminase, reverse transcriptase, non-LTR retrotransposon (and protein encoded), polymerase, diversity generating element (and protein encoded). In some examples, the systems further comprise one or more donor polynucleotides. The donor polynucleotides may be inserted to a target polynucleotide by the systems. The donor polynucleotide may be comprised in or coded by a nucleic acid template.

[0505] In some examples, two or more of the components in a system herein may form a complex. For example, the components are separate molecules but interact with each other directly or indirectly. In certain two or more of the components in a system herein may be comprised in a fusion protein.

[0506] As used herein, “target sequence” refers to a sequence to which a guide sequence is designed to have complementarity, where hybridization between a target sequence and a guide RNA promotes the formation of a DNA or RNA-targeting complex. Full complementarity is not necessarily required, provided there is sufficient complementarity to cause hybridization and promote formation of a nucleic acid-targeting complex. A target sequence may comprise RNA polynucleotides. In one embodiment, a target sequence is located in the nucleus or cytoplasm of a cell. In one embodiment, the target sequence may be within an organelle of a eukaryotic cell, for example, mitochondrion or chloroplast. A sequence or template that may be used for recombination into the targeted locus comprising the target sequences is referred to as an “editing template” or “editing sequence”. In aspects of the invention, an exogenous template may be referred to as an editing template. In an aspect the recombination is homologous recombination.

[0507] In one embodiment, formation of a nucleic acid-targeting complex (comprising a guide RNA hybridized to a target sequence and complexed with one or more nucleic acid-targeting effector proteins) results in cleavage of one or both nucleic acid strands in or near (e.g. within 1, 2, 3, 4, 5, 6, 7, 8, 9, 10, 20, 50, or more base pairs from) the target sequence. In one embodiment, one or more vectors driving expression of one or more elements of a nucleic acid-targeting system are introduced into a host cell such that expression of the elements of the nucleic acid-targeting system direct formation of a nucleic acid-targeting complex at one or more target sites. For example, a nucleic acid-targeting effector protein and a ωRNA or guide RNA could each be operably linked to separate regulatory elements on separate vectors. Alternatively, two or more of the elements expressed from the same or different regulatory elements, may be combined in a single vector, with one or more additional vectors providing any components of the nucleic acid-targeting system not included in the first vector. nucleic acid-targeting system elements that are combined in a single vector may be arranged in any suitable orientation, such as one element located 5′ with respect to (“upstream” of) or 3′ with respect to (“downstream” of) a second element. The coding sequence of one element may be located on the same or opposite strand of the coding sequence of a second element, and oriented in the same or opposite direction. In one embodiment, a single promoter drives expression of a transcript encoding a nucleic acid-targeting effector protein and a guide RNA embedded within one or more intron sequences (e.g. each in a different intron, two or more in at least one intron, or all in a single intron). In one embodiment, the nucleic acid-targeting effector protein and guide RNA are operably linked to and expressed from the same promoter.

[0508] The present disclosure encompasses computational methods and algorithms to predict new IscB polypeptide or CRISPR-associated IscB polypeptide nuclease, identify the components, and new nucleic acid-targeting systems therein. In some examples, a computational method of identifying novel IscB polypeptide or CRISPR-associated IscB polypeptide nuclease loci analysis of the candidates may be conducted by searching metagenomics databases for additional homologs.

[0509] In one aspect the identifying all predicted protein coding genes is carried out by comparing the identified genes with IscB polypeptide or CRISPR-associated IscB polypeptide-specific profiles and annotating them according to NCBI Conserved Domain Database (CDD) which is a protein annotation resource that consists of a collection of well-annotated multiple sequence alignment models for ancient domains and full-length proteins. These are available as position-specific score matrices (PSSMs) for fast identification of conserved domains in protein sequences via RPS-BLAST. CDD content includes NCBI-curated domains, which use 3D-structure information to explicitly define domain boundaries and provide insights into sequence/structure/function relationships, as well as domain models imported from a number of external source databases (Pfam, SMART, COG, PRK, TIGRFAM).

[0510] In a further aspect, the case-by-case analysis is performed using PSI-BLAST (Position-Specific Iterative Basic Local Alignment Search Tool). PSI-BLAST derives a position-specific scoring matrix (PSSM) or profile from the multiple sequence alignment of sequences detected above a given score threshold using protein-protein BLAST. This PSSM is used to further search the database for new matches, and is updated for subsequent iterations with these newly detected sequences. Thus, PSI-BLAST provides a means of detecting distant relationships between proteins.

[0511] In another aspect, the case-by-case analysis is performed using HHpred, a method for sequence database searching and structure prediction that is as easy to use as BLAST or PSI-BLAST and that is at the same time much more sensitive in finding remote homologs. In fact, HHpred's sensitivity is competitive with the most powerful servers for structure prediction currently available. HHpred is the first server that is based on the pairwise comparison of profile hidden Markov models (HMMs). Whereas most conventional sequence search methods search sequence databases such as UniProt or the NR, HHpred searches alignment databases, like Pfam or SMART. This greatly simplifies the list of hits to a number of sequence families instead of a clutter of single sequences. All major publicly available profile and alignment databases are available through HHpred. HHpred accepts a single query sequence or a multiple alignment as input. Within only a few minutes it returns the search results in an easy-to-read format similar to that of PSI-BLAST. Search options include local or global alignment and scoring secondary structure similarity. HHpred can produce pairwise query-template sequence alignments, merged query-template multiple alignments (e.g. for transitive searches), as well as 3D structural models calculated by the MODELLER software from HHpred alignments.

### Multiplexing

[0512] In one embodiment, IscB polypeptide or CRISPR-associated IscB polypeptide nucleases may be used in a multiplex (tandem) targeting approach. For example, IscB polypeptide or CRISPR-associated IscB polypeptide nuclease herein can employ more than one RNA guide without losing activity. This may enable the use of the IscB polypeptide or CRISPR-associated IscB polypeptide nuclease, systems or complexes as defined herein for targeting multiple DNA targets, genes or gene loci, with a single enzyme, system or complex as defined herein. The ωRNA or guide RNAs may be tandemly arranged, optionally separated by a nucleotide sequence such as a conserved nucleotide sequence as defined herein. The position of the different ωRNA or guide RNAs is the tandem does not influence the activity.

[0513] In one aspect, the IscB polypeptide or CRISPR-associated IscB polypeptide nucleases may be used for tandem or multiplex targeting. It is to be understood that any of the IscB polypeptide or CRISPR-associated IscB polypeptide nucleases, complexes, or compositions herein elsewhere may be used in such an approach. Any of the methods, products, compositions and uses as described herein elsewhere are equally applicable with the multiplex or tandem targeting approach further detailed below. By means of further guidance, the following particular aspects and embodiments are provided.

[0514] In one aspect, the invention provides for the use of a IscB polypeptide or CRISPR-associated IscB polypeptide nuclease, complex or system as defined herein for targeting multiple gene loci. In one embodiment, this can be established by using multiple (tandem or multiplex) ωRNA or guide RNA (gRNA) sequences.

[0515] In one aspect, the invention provides methods for using one or more elements of a IscB polypeptide or CRISPR-associated IscB polypeptide nuclease, complex or system as defined herein for tandem or multiplex targeting, wherein said system herein comprises multiple ωRNA or guide RNA sequences. Said ωRNA or gRNA sequences are separated by a nucleotide sequence, such as a conserved nucleotide sequence as defined herein elsewhere.

[0516] The IscB polypeptide or CRISPR-associated IscB polypeptide nucleases, compositions, systems or complexes as defined herein provides an effective means for modifying multiple target polynucleotides. The IscB polypeptide or CRISPR-associated IscB polypeptide nuclease, system or complex as defined herein has a wide variety of utility including modifying (e.g., deleting, inserting, translocating, inactivating, activating) one or more target polynucleotides in a multiplicity of cell types. As such the IscB polypeptide or CRISPR-associated IscB polypeptide nuclease, system or complex as defined herein of the invention has a broad spectrum of applications in, e.g., gene therapy, drug screening, disease diagnosis, and prognosis, including targeting multiple gene loci within a single system.

[0517] In one aspect, the present disclosure provides a IscB polypeptide or CRISPR-associated IscB polypeptide nuclease, system or complex as defined herein, having a IscB polypeptide or CRISPR-associated IscB polypeptide nuclease having at least one destabilization domain associated therewith, and multiple guide RNAs that target multiple nucleic acid molecules such as DNA molecules, whereby each of said multiple guide RNAs specifically targets its corresponding nucleic acid molecule, e.g., DNA molecule. Each nucleic acid molecule target, e.g., DNA molecule can encode a gene product or encompass a gene locus. Using multiple ωRNA or guide RNAs hence enables the targeting of multiple gene loci or multiple genes. In one embodiment the IscB polypeptide or CRISPR-associated IscB polypeptide nuclease may cleave the DNA molecule encoding the gene product. In one embodiment expression of the gene product is altered. The IscB polypeptide or CRISPR-associated IscB polypeptide nuclease and the guide RNAs do not naturally occur together. The present disclosure comprehends the ωRNA or guide RNAs comprising tandemly arranged guide sequences. The present disclosure further comprehends coding sequences for the IscB polypeptide or CRISPR-associated IscB polypeptide nuclease being codon optimized for expression in a eukaryotic cell. In an embodiment the eukaryotic cell is a mammalian cell, a plant cell or a yeast cell and in a more preferred embodiment the mammalian cell is a human cell. Expression of the gene product may be decreased. The IscB polypeptide or CRISPR-associated IscB polypeptide nuclease may form part of a system or complex, which further comprises tandemly arranged ωRNA or guide RNAs (gRNAs) comprising a series of 2, 3, 4, 5, 6, 7, 8, 9, 10, 15, 25, 25, 30, or more than 30 guide sequences, each capable of specifically hybridizing to a target sequence in a genomic locus of interest in a cell. In one embodiment, the functional system or complex binds to the multiple target sequences. In one embodiment, the functional system or complex may edit the multiple target sequences, e.g., the target sequences may comprise a genomic locus, and In one embodiment, there may be an alteration of gene expression. In one embodiment, the functional system or complex may comprise further functional domains. In one embodiment, the invention provides a method for altering or modifying expression of multiple gene products. The method may comprise introducing into a cell containing said target nucleic acids, e.g., DNA molecules, or containing and expressing target nucleic acid, e.g., DNA molecules; for instance, the target nucleic acids may encode gene products or provide for expression of gene products (e.g., regulatory sequences).

[0518] In one embodiment, the IscB polypeptide or CRISPR-associated IscB polypeptide nuclease used for multiplex targeting is associated with one or more functional domains. In some more specific embodiments, the IscB polypeptide or CRISPR-associated IscB polypeptide nuclease used for multiplex targeting is a dead IscB polypeptide nuclease. The inventors have found that the IscB polypeptide or CRISPR-associated IscB polypeptide nuclease as described herein may enable improved and/or direct access to one or more nucleotides involved in the DNA:RNA duplex.

### Donor Polynucleotides

[0519] In one embodiment, the compositions and systems herein may comprise one or more nucleic acid templates. In some cases, the nucleic acid template may comprise one or more polynucleotides. In certain cases, the nucleic acid template may comprise coding sequences for one or more polynucleotides. The nucleic acid template may be an RNA template. The nucleic acid template may be a DNA template.

[0520] The donor polynucleotide may be used for editing the target polynucleotide. In some cases, the donor polynucleotide comprises one or more mutations to be introduced into the target polynucleotide. Examples of such mutations include substitutions, deletions, insertions, or a combination thereof. The mutations may cause a shift in an open reading frame on the target polynucleotide. In some cases, the donor polynucleotide alters a stop codon in the target polynucleotide. For example, the donor polynucleotide may correct a premature stop codon. The correction may be achieved by deleting the stop codon or introduces one or more mutations to the stop codon. In other example embodiments, the donor polynucleotide addresses loss of function mutations, deletions, or translocations that may occur, for example, in certain disease contexts by inserting or restoring a functional copy of a gene, or functional fragment thereof, or a functional regulatory sequence or functional fragment of a regulatory sequence. A functional fragment refers to less than the entire copy of a gene by providing sufficient nucleotide sequence to restore the functionality of a wild type gene or non-coding regulatory sequence (e.g. sequences encoding long non-coding RNA). In certain example embodiments, the systems disclosed herein may be used to replace a single allele of a defective gene or defective fragment thereof. In another example embodiment, the systems disclosed herein may be used to replace both alleles of a defective gene or defective gene fragment. A “defective gene” or “defective gene fragment” is a gene or portion of a gene that when expressed fails to generate a functioning protein or non-coding RNA with functionality of a the corresponding wild-type gene. In certain example embodiments, these defective genes may be associated with one or more disease phenotypes. In certain example embodiments, the defective gene or gene fragment is not replaced but the systems described herein are used to insert donor polynucleotides that encode gene or gene fragments that compensate for or override defective gene expression such that cell phenotypes associated with defective gene expression are eliminated or changed to a different or desired cellular phenotype.

[0521] In an embodiment of the invention, the donor polynucleotide may include, but not be limited to, genes or gene fragments, encoding proteins or RNA transcripts to be expressed, regulatory elements, repair templates, and the like. According to the invention, the donor polynucleotides may comprise left end and right end sequence elements that function with transposition components that mediate insertion.

[0522] In certain cases, the donor polynucleotide manipulates a splicing site on the target polynucleotide. In some examples, the donor polynucleotide disrupts a splicing site. The disruption may be achieved by inserting the polynucleotide to a splicing site and/or introducing one or more mutations to the splicing site. In certain examples, the donor polynucleotide may restore a splicing site. For example, the polynucleotide may comprise a splicing site sequence.

[0523] The donor polynucleotide to be inserted may has a size from 10 basepair or nucleotides to 50 kb in length, e.g., from 50 to 40 k, from 100 and 30 k, from 100 to 10000, from 100 to 300, from 200 to 400, from 300 to 500, from 400 to 600, from 500 to 700, from 600 to 800, from 700 to 900, from 800 to 1000, from 900 to from 1100, from 1000 to 1200, from 1100 to 1300, from 1200 to 1400, from 1300 to 1500, from 1400 to 1600, from 1500 to 1700, from 600 to 1800, from 1700 to 1900, from 1800 to 2000 base pairs (bp) or nucleotides in length.

### Inducible Systems

[0524] In one embodiment, a IscB polypeptide or CRISPR-associated IscB polypeptide nuclease may form a component of an inducible system. The inducible nature of the system would allow for spatiotemporal control of gene editing or gene expression using a form of energy. The form of energy may include but is not limited to electromagnetic radiation, sound energy, chemical energy and thermal energy. Examples of inducible system include tetracycline inducible promoters (Tet-On or Tet-Off), small molecule two-hybrid transcription activations systems (FKBP, ABA, etc.), or light inducible systems (Phytochrome, LOV domains, or cryptochrome). In one embodiment, the IscB polypeptide or CRISPR-associated IscB polypeptide nuclease may be a part of a Light Inducible Transcriptional Effector (LITE) to direct changes in transcriptional activity in a sequence-specific manner. The components of a light may include a IscB polypeptide or CRISPR-associated IscB polypeptide nuclease, a light-responsive cytochrome heterodimer (e.g. from Arabidopsis thaliana), and a transcriptional activation/repression domain. Further examples of inducible DNA binding proteins and methods for their use are provided in US Provisional Application Nos. 61/736,465 and U.S. 61/721,283,and International Patent Publication No. WO 2014/018423 A2 which is hereby incorporated by reference in its entirety.

### Self-Inactivating Systems

[0525] Once all copies of a gene in the genome of a cell have been edited, continued expression of the system in that cell is no longer necessary. Indeed, sustained expression would be undesirable in case of off-target effects at unintended genomic sites, etc. Thus time-limited expression would be useful. Inducible expression offers one approach, but in addition Applicants have engineered a self-Inactivating system that relies on the use of a non-coding guide target sequence within the vector itself. Thus, after expression begins, the system will lead to its own destruction, but before destruction is complete it will have time to edit the genomic copies of the target gene (which, with a normal point mutation in a diploid cell, requires at most two edits). Simply, the self-inactivating system includes additional RNA (e.g., guide RNA) that targets the coding sequence for the IscB polypeptide or CRISPR-associated IscB polypeptide nuclease itself or that targets one or more non-coding guide target sequences complementary to unique sequences present in one or more of the following: (a) within the promoter driving expression of the non-coding RNA elements, (b) within the promoter driving expression of the IscB polypeptide or CRISPR-associated IscB polypeptide nuclease gene, (c) within 100 bp of the ATG translational start codon in the IscB polypeptide nuclease coding sequence, (d) within the inverted terminal repeat (iTR) of a viral delivery vector, e.g., in the AAV genome.

[0526] In some aspects, a single ωRNA or gRNA is provided that is capable of hybridization to a sequence downstream of a IscB polypeptide or CRISPR-associated IscB polypeptide nuclease start codon, whereby after a period of time there is a loss of the IscB polypeptide or CRISPR-associated IscB polypeptide nuclease expression. In some aspects, one or more ωRNA or gRNA(s) are provided that are capable of hybridization to one or more coding or non-coding regions of the polynucleotide encoding the system, whereby after a period of time there is a inactivation of one or more, or in some cases all, of the system. In some aspects of the system, and not to be limited by theory, the cell may comprise a plurality of complexes, wherein a first subset of complexes comprise a first ωRNA or guide RNA capable of targeting a genomic locus or loci to be edited, and a second subset of complexes comprise at least one ωRNA or second guide RNA capable of targeting the polynucleotide encoding the system, wherein the first subset of complexes mediate editing of the targeted genomic locus or loci and the second subset of complexes eventually inactivate the system, thereby inactivating further expression in the cell.

[0527] The various coding sequences (IscB polypeptide or CRISPR-associated IscB polypeptide nuclease and guide RNAs) can be included on a single vector or on multiple vectors. For instance, it is possible to encode the enzyme on one vector and the various RNA sequences on another vector, or to encode the enzyme and one ωRNA or guide RNA on one vector, and the remaining ωRNA or guide RNA on another vector, or any other permutation. In general, a system using a total of one or two different vectors is preferred.

[0528] Where multiple vectors are used, it is possible to deliver them in unequal numbers, and ideally with an excess of a vector which encodes the first ωRNA or guide RNA relative to the second ωRNA or guide RNA, thereby assisting in delaying final inactivation of the system until genome editing has had a chance to occur.

[0529] The first ωRNA or guide RNA can target any target sequence of interest within a genome, as described elsewhere herein. The second ωRNA or guide RNA targets a sequence within the vector which encodes the IscB polypeptide or CRISPR-associated IscB polypeptide nuclease, and thereby inactivates the enzyme's expression from that vector. Thus the target sequence in the vector must be capable of inactivating expression. Suitable target sequences can be, for instance, near to or within the translational start codon for the IscB polypeptide or CRISPR-associated IscB polypeptide nuclease coding sequence, in a non-coding sequence in the promoter driving expression of the non-coding RNA elements, within the promoter driving expression of the IscB polypeptide nuclease gene, within 100 bp of the ATG translational start codon in the IscB polypeptide nuclease coding sequence, and/or within the inverted terminal repeat (iTR) of a viral delivery vector, e.g., in the AAV genome. A double stranded break near this region can induce a frame shift in the IscB polypeptide nuclease coding sequence, causing a loss of protein expression. An alternative target sequence for the “self-inactivating” ωRNA or guide RNA would aim to edit/inactivate regulatory regions/sequences needed for the expression of the system or for the stability of the vector. For instance, if the promoter for the IscB polypeptide or CRISPR-associated IscB polypeptide nuclease coding sequence is disrupted then transcription can be inhibited or prevented. Similarly, if a vector includes sequences for replication, maintenance or stability then it is possible to target these. For instance, in a AAV vector a useful target sequence is within the iTR. Other useful sequences to target can be promoter sequences, polyadenylation sites, etc.

[0530] Furthermore, if the ωRNA or guide RNAs are expressed in array format, the “self-inactivating” ωRNA or guide RNAs that target both promoters simultaneously will result in the excision of the intervening nucleotides from within the IscB polypeptide or CRISPR-associated IscB polypeptide nuclease expression construct, effectively leading to its complete inactivation. Similarly, excision of the intervening nucleotides will result where the ωRNA or guide RNAs target both ITRs, or targets two or more other components simultaneously. Self-inactivation as explained herein is applicable, in general, with systems in order to provide regulation of the systems. For example, self-inactivation as explained herein may be applied to the repair of mutations, for example expansion disorders, as explained herein. As a result of this self-inactivation, repair may be only transiently active.

[0531] Addition of non-targeting nucleotides to the 5′ end (e.g. 1-10 nucleotides, preferably 1-5 nucleotides) of the “self-inactivating” ωRNA or guide RNA can be used to delay its processing and/or modify its efficiency as a means of ensuring editing at the targeted genomic locus prior to shut down.

[0532] In one aspect of the self-inactivating AAV system, plasmids that co-express one or more ωRNA or guide RNA targeting genomic sequences of interest (e.g. 1-2, 1-5, 1-10, 1-15, 1-20, 1-30) may be established with “self-inactivating” ωRNA or guide RNAs that target an IscB polypeptide or CRISPR-associated IscB polypeptide nuclease sequence at or near the engineered ATG start site (e.g. within 5 nucleotides, within 15 nucleotides, within 30 nucleotides, within 50 nucleotides, within 100 nucleotides). A regulatory sequence in the U6 promoter region can also be targeted with an ωRNA or guide RNA. The U6-driven guide RNAs may be designed in an array format such that multiple ωRNA or guide RNA sequences can be simultaneously released. When first delivered into target tissue/cells (left cell) ωRNA or guide RNAs begin to accumulate while IscB polypeptide or CRISPR-associated IscB polypeptide nuclease levels rise in the nucleus. IscB polypeptide or CRISPR-associated IscB polypeptide nuclease complexes with all of the guide RNAs to mediate genome editing and self-inactivation of the IscB polypeptide or CRISPR-associated IscB polypeptide nuclease plasmids.

[0533] One aspect of a self-inactivating system is expression of singly or in tandem array format from 1 up to 4 or more different ωRNA or guide sequences; e.g. up to about 20 or about 30 ωRNA or guide sequences. Each individual self-inactivating ωRNA or guide sequence may target a different target. Such may be processed from, e.g. one chimeric pol3 transcript. Pol3 promoters such as U6 or H1 promoters may be used. Pol2 promoters such as those mentioned throughout herein. Inverted terminal repeat (iTR) sequences may flank the Pol3 promoter—ωRNA or guide RNA(s)-Pol2 promoter-IscB polypeptide or CRISPR-associated IscB polypeptide nuclease.

[0534] One aspect of a tandem array transcript is that one or more ωRNA or guide(s) edit the one or more target(s) while one or more self-inactivating ωRNA or guides inactivate the system. Thus, for example, the described system for repairing expansion disorders may be directly combined with the self-inactivating system described herein. Such a system may, for example, have two ωRNA or guides directed to the target region for repair as well as at least a third ωRNA or guide directed to self-inactivation of the IscB polypeptide or CRISPR-associated IscB polypeptide nuclease or systems.

[0535] The ωRNA or guide RNA may be a control guide. For example it may be engineered to target a nucleic acid sequence encoding the IscB polypeptide or CRISPR-associated IscB polypeptide nuclease itself, as described in U.S. Patent Publication No. US2015232881A1, the disclosure of which is hereby incorporated by reference. In one embodiment, a system or composition may be provided with just the ωRNA or guide RNA engineered to target the nucleic acid sequence encoding the IscB polypeptide or CRISPR-associated IscB polypeptide nuclease. In addition, the system or composition may be provided with the ωRNA or guide RNA engineered to target the nucleic acid sequence encoding the IscB polypeptide or CRISPR-associated IscB polypeptide nuclease, as well as nucleic acid sequence encoding the IscB polypeptide or CRISPR-associated IscB polypeptide nuclease and, optionally a second ωRNA or guide RNA and, further optionally, a repair template. The second ωRNA or guide RNA may be the primary target of the system or composition (such a therapeutic, diagnostic, knock out etc. as defined herein). In this way, the system or composition is self-inactivating. This is exemplified in relation to Cas in US2015232881A1 (also published as WO2015070083 (A1) referenced elsewhere herein, and may be extrapolated to other IscB polypeptide or CRISPR-associated IscB polypeptide nuclease, e.g. IscB polypeptides.

### Polynucleotides

[0536] The systems herein may comprise one or more polynucleotides. The polynucleotide(s) may comprise coding sequences of components of the systems herein, e.g., IscB polypeptide or CRISPR-associated IscB polypeptide nuclease, ωRNA(s), functional domain(s), donor polynucleotide(s), and/or other components in the systems. The present disclosure further provides vectors or vector systems comprising one or more polynucleotides herein. The vectors or vector systems include those described in the delivery sections herein.

[0537] The terms “polynucleotide”, “nucleotide”, “nucleotide sequence”, “nucleic acid” and “oligonucleotide” are used interchangeably. They refer to a polymeric form of nucleotides of any length, either deoxyribonucleotides or ribonucleotides, or analogs thereof. Polynucleotides may have any three-dimensional structure, and may perform any function, known or unknown. The following are non-limiting examples of polynucleotides: coding or non-coding regions of a gene or gene fragment, loci (locus) defined from linkage analysis, exons, introns, messenger RNA (mRNA), transfer RNA, ribosomal RNA, short interfering RNA (siRNA), short-hairpin RNA (shRNA), micro-RNA (miRNA), ribozymes, cDNA, recombinant polynucleotides, branched polynucleotides, plasmids, vectors, isolated DNA of any sequence, isolated RNA of any sequence, nucleic acid probes, and primers. The term also encompasses nucleic-acid-like structures with synthetic backbones, see, e.g., Eckstein, 1991; Baserga et al., 1992; Milligan, 1993; WO 97/03211; WO 96/39154; Mata, 1997; Strauss-Soukup, 1997; and Samstag, 1996. A polynucleotide may comprise one or more modified nucleotides, such as methylated nucleotides and nucleotide analogs. If present, modifications to the nucleotide structure may be imparted before or after assembly of the polymer. The sequence of nucleotides may be interrupted by non-nucleotide components. A polynucleotide may be further modified after polymerization, such as by conjugation with a labeling component. As used herein the term “wild type” is a term of the art understood by skilled persons and means the typical form of an organism, strain, gene or characteristic as it occurs in nature as distinguished from mutant or variant forms. A “wild type” can be a base line. As used herein the term “variant” should be taken to mean the exhibition of qualities that have a pattern that deviates from what occurs in nature. The terms “non-naturally occurring” or “engineered” are used interchangeably and indicate the involvement of the hand of man. The terms, when referring to nucleic acid molecules or polypeptides mean that the nucleic acid molecule or the polypeptide is at least substantially free from at least one other component with which they are naturally associated in nature and as found in nature. “Complementarity” refers to the ability of a nucleic acid to form hydrogen bond(s) with another nucleic acid sequence by either traditional Watson-Crick base pairing or other non-traditional types. A percent complementarity indicates the percentage of residues in a nucleic acid molecule which can form hydrogen bonds (e.g., Watson-Crick base pairing) with a second nucleic acid sequence (e.g., 5, 6, 7, 8, 9, 10 out of 10 being 50%, 60%, 70%, 80%, 90%, and 100% complementary). “Perfectly complementary” means that all the contiguous residues of a nucleic acid sequence will hydrogen bond with the same number of contiguous residues in a second nucleic acid sequence. “Substantially complementary” as used herein refers to a degree of complementarity that is at least 60%, 65%, 70%, 75%, 80%, 85%, 90%, 95%, 97%, 98%, 99%, or 100% over a region of 8, 9, 10, 11, 12, 13, 14, 15, 16, 17, 18, 19, 20, 21, 22, 23, 24, 25, 30, 35, 40, 45, 50, or more nucleotides, or refers to two nucleic acids that hybridize under stringent conditions. As used herein, “stringent conditions” for hybridization refer to conditions under which a nucleic acid having complementarity to a target sequence predominantly hybridizes with the target sequence, and substantially does not hybridize to non-target sequences. Stringent conditions are generally sequence-dependent, and vary depending on a number of factors. In general, the longer the sequence, the higher the temperature at which the sequence specifically hybridizes to its target sequence. Non-limiting examples of stringent conditions are described in detail in Tijssen (1993), Laboratory Techniques In Biochemistry And Molecular Biology-Hybridization With Nucleic Acid Probes Part I, Second Chapter “Overview of principles of hybridization and the strategy of nucleic acid probe assay”, Elsevier, N.Y. Where reference is made to a polynucleotide sequence, then complementary or partially complementary sequences are also envisaged. These are preferably capable of hybridizing to the reference sequence under highly stringent conditions. “Hybridization” refers to a reaction in which one or more polynucleotides react to form a complex that is stabilized via hydrogen bonding between the bases of the nucleotide residues. The hydrogen bonding may occur by Watson Crick base pairing, Hoogstein binding, or in any other sequence specific manner. The complex may comprise two strands forming a duplex structure, three or more strands forming a multi stranded complex, a single self-hybridizing strand, or any combination of these. A hybridization reaction may constitute a step in a more extensive process, such as the initiation of PCR, or the cleavage of a polynucleotide by an enzyme. A sequence capable of hybridizing with a given sequence is referred to as the “complement” of the given sequence. As used herein, the term “genomic locus” or “locus” (plural loci) is the specific location of a gene or DNA sequence on a chromosome. A “gene” refers to stretches of DNA or RNA that encode a polypeptide or an RNA chain that has functional role to play in an organism and hence is the molecular unit of heredity in living organisms. For the purpose of this invention, it may be considered that genes include regions which regulate the production of the gene product, whether or not such regulatory sequences are adjacent to coding and/or transcribed sequences. Accordingly, a gene includes, but is not necessarily limited to, promoter sequences, terminators, translational regulatory sequences such as ribosome binding sites and internal ribosome entry sites, enhancers, silencers, insulators, boundary elements, replication origins, matrix attachment sites and locus control regions. As used herein, “expression of a genomic locus” or “gene expression” is the process by which information from a gene is used in the synthesis of a functional gene product. The products of gene expression are often proteins, but in non-protein coding genes such as rRNA genes or tRNA genes, the product is functional RNA. The process of gene expression is used by all known life—eukaryotes (including multicellular organisms), prokaryotes (bacteria and archaea) and viruses to generate functional products to survive. As used herein “expression” of a gene or nucleic acid encompasses not only cellular gene expression, but also the transcription and translation of nucleic acid(s) in cloning systems and in any other context. As used herein, “expression” also refers to the process by which a polynucleotide is transcribed from a DNA template (such as into and mRNA or other RNA transcript) and/or the process by which a transcribed mRNA is subsequently translated into peptides, polypeptides, or proteins. Transcripts and encoded polypeptides may be collectively referred to as “gene product.” If the polynucleotide is derived from genomic DNA, expression may include splicing of the mRNA in a eukaryotic cell. The terms “polypeptide”, “peptide” and “protein” are used interchangeably herein to refer to polymers of amino acids of any length. The polymer may be linear or branched, it may comprise modified amino acids, and it may be interrupted by non amino acids. The terms also encompass an amino acid polymer that has been modified; for example, disulfide bond formation, glycosylation, lipidation, acetylation, phosphorylation, or any other manipulation, such as conjugation with a labeling component. As used herein the term “amino acid” includes natural and/or unnatural or synthetic amino acids, including glycine and both the D or L optical isomers, and amino acid analogs and peptidomimetics. As used herein, the term “domain” or “protein domain” refers to a part of a protein sequence that may exist and function independently of the rest of the protein chain. As described in aspects of the invention, sequence identity is related to sequence homology. Homology comparisons may be conducted by eye, or more usually, with the aid of readily available sequence comparison programs. These commercially available computer programs may calculate percent (%) homology between two or more sequences and may also calculate the sequence identity shared by two or more amino acid or nucleic acid sequences.

[0538] In an embodiment, the polynucleotide sequence is recombinant DNA. In further embodiments, the polynucleotide sequence further comprises additional sequences as described elsewhere herein. In an embodiment, the nucleic acid sequence is synthesized in vitro.

[0539] The present disclosure provides polynucleotide molecules that encode one or more components of the system or IscB polypeptide nuclease as referred to in any embodiment herein. In an embodiment, the polynucleotide molecules may comprise further regulatory sequences. By means of guidance and not limitation, the polynucleotide sequence can be part of an expression plasmid, a minicircle, a lentiviral vector, a retroviral vector, an adenoviral or adeno-associated viral vector, a piggyback vector, or a tol2 vector. In an embodiment, the polynucleotide sequence may be a bicistronic expression construct. In further embodiments, the isolated polynucleotide sequence may be incorporated in a cellular genome. In yet further embodiments, the isolated polynucleotide sequence may be part of a cellular genome. In further embodiments, the isolated polynucleotide sequence may be comprised in an artificial chromosome. In an embodiment, the 5′ and/or 3′ end of the isolated polynucleotide sequence may be modified to improve the stability of the sequence of actively avoid degradation. In an embodiment, the isolated polynucleotide sequence may be comprised in a bacteriophage. In other embodiments, the isolated polynucleotide sequence may be contained in agrobacterium species. In an embodiment, the isolated polynucleotide sequence is lyophilized.

[0540] Aspects of the invention relate to polynucleotide molecules that encode one or more components of one or more systems as described in any of the embodiments herein, wherein at least one or more regions of the polynucleotide molecule may be codon optimized for expression in a eukaryotic cells. In an embodiment, the polynucleotide molecules that encode one or more components of one or more systems as described in any of the embodiments herein are optimized for expression in a mammalian cell or a plant cell.

[0541] An example of a codon optimized sequence is in this instance a sequence optimized for expression in a eukaryote, e.g., humans (i.e. being optimized for expression in humans), or for another eukaryote, animal or mammal as herein discussed. In one embodiment, an enzyme coding sequence encoding a DNA/RNA-targeting IscB polypeptide or CRISPR-associated IscB polypeptide nuclease is codon optimized for expression in particular cells, such as eukaryotic cells. The eukaryotic cells may be those of or derived from a particular organism, such as a plant or a mammal, including but not limited to human, or non-human eukaryote or animal or mammal as herein discussed, e.g., mouse, rat, rabbit, dog, livestock, or non-human mammal or primate. In one embodiment, processes for modifying the germ line genetic identity of human beings and/or processes for modifying the genetic identity of animals which are likely to cause them suffering without any substantial medical benefit to man or animal, and also animals resulting from such processes, may be excluded. In general, codon optimization refers to a process of modifying a nucleic acid sequence for enhanced expression in the host cells of interest by replacing at least one codon (e.g., about or more than about 1, 2, 3, 4, 5, 10, 15, 20, 25, 50, or more codons) of the native sequence with codons that are more frequently or most frequently used in the genes of that host cell while maintaining the native amino acid sequence. Various species exhibit particular bias for certain codons of a particular amino acid. Codon bias (differences in codon usage between organisms) often correlates with the efficiency of translation of messenger RNA (mRNA), which is in turn believed to be dependent on, among other things, the properties of the codons being translated and the availability of particular transfer RNA (tRNA) molecules. The predominance of selected tRNAs in a cell is generally a reflection of the codons used most frequently in peptide synthesis. Accordingly, genes can be tailored for optimal gene expression in a given organism based on codon optimization. Codon usage tables are readily available, for example, at the “Codon Usage Database” available at www.kazusa.orjp/codon/ and these tables can be adapted in a number of ways. See Nakamura, Y., et al. “Codon usage tabulated from the international DNA sequence databases: status for the year 2000” Nucl. Acids Res. 28:292 (2000). Computer algorithms for codon optimizing a particular sequence for expression in a particular host cell are also available, such as Gene Forge (Aptagen; Jacobus, PA), are also available. In one embodiment, one or more codons (e.g., 1, 2, 3, 4, 5, 10, 15, 20, 25, 50, or more, or all codons) in a sequence encoding a IscB polypeptide nuclease corresponds to the most frequently used codon for a particular amino acid.

### Delivery

[0542] The present disclosure also provides delivery systems for introducing components of the systems and compositions herein to cells, tissues, organs, or organisms. A delivery system may comprise one or more delivery vehicles and/or cargos. Exemplary delivery systems and methods include those described in paragraphs [00117] to [00278] of Feng Zhang et al., (WO2016106236A1), and pages 1241-1251 and Table 1 of Lino C A et al., Delivering CRISPR: a review of the challenges and approaches, DRUG DELIVERY, 2018, VOL. 25, NO. 1, 1234-1257, which are incorporated by reference herein in their entireties and can be adapted for use with the IscB proteins disclosed herein.

[0543] In one embodiment, the delivery systems may be used to introduce the components of the systems and compositions to plant cells. For example, the components may be delivered to plant using electroporation, microinjection, aerosol beam injection of plant cell protoplasts, biolistic methods, DNA particle bombardment, and/or Agrobacterium-mediated transformation. Examples of methods and delivery systems for plants include those described in Fu et al., Transgenic Res. 2000 February; 9(1):11-9; Klein R M, et al., Biotechnology. 1992; 24:384-6; Casas A M et al., Proc Natl Acad Sci USA. 1993 Dec. 1; 90(23): 11212-11216; and U.S. Pat. No. 5,563,055, Davey M R et al., Plant Mol Biol. 1989 September; 13(3):273-85, which are incorporated by reference herein in their entireties.

[0544] The example delivery compositions, systems, and methods described herein related to composition or IscB polypeptide or CRISPR-associated IscB polypeptide nuclease also apply to functional domains and other components (e.g., other proteins and polynucleotides related to the IscB polypeptide or CRISPR-associated IscB polypeptide nuclease, such as reverse transcriptase, nucleotide deaminase, retrotransposon, donor polynucleotide, etc.). Cargos

[0545] The delivery systems may comprise one or more cargos. The cargos may comprise one or more components of the systems and compositions herein. A cargo may comprise one or more of the following: i) a plasmid encoding one or more proteins components in the compositions and systems such as the IscB polypeptide or CRISPR-associated IscB polypeptide nuclease and/or functional domains; ii) a plasmid encoding one or more hRNAs, iii) mRNA of one or more one or more proteins components in the compositions and systems such as the IscB polypeptide or CRISPR-associated IscB polypeptide nuclease and/or functional domains; iv) one or more guide RNAs; v) one or more proteins components in the compositions and systems such as the IscB polypeptide or CRISPR-associated IscB polypeptide nuclease and/or functional domains; vi) any combination thereof. The one or more protein components may include the nuclei acid-guided nuclease (e.g., Cas), reverse transcriptase, nucleotide deaminase, retrotransposon protein, other functional domain, or any combination thereof.

[0546] In some examples, a cargo may comprise a plasmid encoding one or more proteins components in the compositions and systems such as the IscB polypeptide or CRISPR-associated IscB polypeptide nuclease and/or functional domains and one or more (e.g., a plurality of) guide RNAs. In some cases, the plasmid may also encode a recombination template (e.g., for HDR). In one embodiment, a cargo may comprise mRNA encoding one or more protein components and one or more ωRNA or guide RNAs.

[0547] In some examples, a cargo may comprise one or more protein components and one or more ωRNA or guide RNAs, e.g., in the form of ribonucleoprotein complexes (RNP). The ribonucleoprotein complexes may be delivered by methods and systems herein. In some cases, the ribonucleoprotein may be delivered by way of a polypeptide-based shuttle agent. In one example, the ribonucleoprotein may be delivered using synthetic peptides comprising an endosome leakage domain (ELD) operably linked to a cell penetrating domain (CPD), to a histidine-rich domain and a CPD, e.g., as describe in WO2016161516. RNP may also be used for delivering the compositions and systems to plant cells, e.g., as described in Wu J W, et al., Nat Biotechnol. 2015 November; 33(11):1162-4.

### Physical Delivery

[0548] In one embodiment, the cargos may be introduced to cells by physical delivery methods. Examples of physical methods include microinjection, electroporation, and hydrodynamic delivery. Both nucleic acid and proteins may be delivered using such methods. For example, one or more protein components may be prepared in vitro, isolated, (refolded, purified if needed), and introduced to cells.

### Microinjection

[0549] Microinjection of the cargo directly to cells can achieve high efficiency, e.g., above 90% or about 100%. In one embodiment, microinjection may be performed using a microscope and a needle (e.g., with 0.5-5.0 μm in diameter) to pierce a cell membrane and deliver the cargo directly to a target site within the cell. Microinjection may be used for in vitro and ex vivo delivery.

[0550] Plasmids comprising coding sequences for one or more protein components and/or ωRNAs, mRNAs, and/or guide RNAs, may be microinjected. In some cases, microinjection may be used i) to deliver DNA directly to a cell nucleus, and/or ii) to deliver mRNA (e.g., in vitro transcribed) to a cell nucleus or cytoplasm. In certain examples, microinjection may be used to delivery ωRNA directly to the nucleus and mRNA to the cytoplasm, e.g., facilitating translation and shuttling of one or more protein components to the nucleus.

[0551] Microinjection may be used to generate genetically modified animals. For example, gene editing cargos may be injected into zygotes to allow for efficient germline modification. Such approach can yield normal embryos and full-term mouse pups harboring the desired modification(s). Microinjection can also be used to provide transiently up- or down-regulate a specific gene within the genome of a cell, e.g., using IscB polypeptide or CRISPR-associated IscB polypeptide.

### Electroporation

[0552] In one embodiment, the cargos and/or delivery vehicles may be delivered by electroporation. Electroporation may use pulsed high-voltage electrical currents to transiently open nanometer-sized pores within the cellular membrane of cells suspended in buffer, allowing for components with hydrodynamic diameters of tens of nanometers to flow into the cell. In some cases, electroporation may be used on various cell types and efficiently transfer cargo into cells. Electroporation may be used for in vitro and ex vivo delivery.

[0553] Electroporation may also be used to deliver the cargo to into the nuclei of mammalian cells by applying specific voltage and reagents, e.g., by nucleofection. Such approaches include those described in Wu Y, et al. (2015). Cell Res 25:67-79; Ye L, et al. (2014). Proc Natl Acad Sci USA 111:9591-6; Choi P S, Meyerson M. (2014). Nat Commun 5:3728; Wang J, Quake S R. (2014). Proc Natl Acad Sci 111:13157-62. Electroporation may also be used to deliver the cargo in vivo, e.g., with methods described in Zuckermann M, et al. (2015). Nat Commun 6:7391.

### Hydrodynamic Delivery

[0554] Hydrodynamic delivery may also be used for delivering the cargos, e.g., for in vivo delivery. In some examples, hydrodynamic delivery may be performed by rapidly pushing a large volume (8-10% body weight) solution containing the gene editing cargo into the bloodstream of a subject (e.g., an animal or human), e.g., for mice, via the tail vein. As blood is incompressible, the large bolus of liquid may result in an increase in hydrodynamic pressure that temporarily enhances permeability into endothelial and parenchymal cells, allowing for cargo not normally capable of crossing a cellular membrane to pass into cells. This approach may be used for delivering naked DNA plasmids and proteins. The delivered cargos may be enriched in liver, kidney, lung, muscle, and/or heart.

### Transfection

[0555] The cargos, e.g., nucleic acids, may be introduced to cells by transfection methods for introducing nucleic acids into cells. Examples of transfection methods include calcium phosphate-mediated transfection, cationic transfection, liposome transfection, dendrimer transfection, heat shock transfection, magnetofection, lipofection, impalefection, optical transfection, proprietary agent-enhanced uptake of nucleic acid.

### Delivery Vehicles

[0556] The delivery systems may comprise one or more delivery vehicles. The delivery vehicles may deliver the cargo into cells, tissues, organs, or organisms (e.g., animals or plants). The cargos may be packaged, carried, or otherwise associated with the delivery vehicles. The delivery vehicles may be selected based on the types of cargo to be delivered, and/or the delivery is in vitro and/or in vivo. Examples of delivery vehicles include vectors, viruses, non-viral vehicles, and other delivery reagents described herein.

[0557] The delivery vehicles in accordance with the present invention may have a greatest dimension (e.g. diameter) of less than 100 microns (μm). In one embodiment, the delivery vehicles have a greatest dimension of less than 10 μm. In one embodiment, the delivery vehicles may have a greatest dimension of less than 2000 nanometers (nm). In one embodiment, the delivery vehicles may have a greatest dimension of less than 1000 nanometers (nm). In one embodiment, the delivery vehicles may have a greatest dimension (e.g., diameter) of less than 900 nm, less than 800 nm, less than 700 nm, less than 600 nm, less than 500 nm, less than 400 nm, less than 300 nm, less than 200 nm, less than 150 nm, or less than 100 nm, less than 50 nm. In one embodiment, the delivery vehicles may have a greatest dimension ranging between 25 nm and 200 nm.

[0558] In one embodiment, the delivery vehicles may be or comprise particles. For example, the delivery vehicle may be or comprise nanoparticles (e.g., particles with a greatest dimension (e.g., diameter) no greater than 1000 nm. The particles may be provided in different forms, e.g., as solid particles (e.g., metal such as silver, gold, iron, titanium), non-metal, lipid-based solids, polymers), suspensions of particles, or combinations thereof. Metal, dielectric, and semiconductor particles may be prepared, as well as hybrid structures (e.g., core-shell particles). Nanoparticles may also be used to deliver the compositions and systems to plant cells, e.g., as described in International Patent Publication No. WO 2008042156, US Publication Application No. US 20130185823, and International Patent Publication No WO 2015/089419.

### Vectors

[0559] The systems, compositions, and/or delivery systems may comprise one or more vectors. The present disclosure also include vector systems. A vector system may comprise one or more vectors. In one embodiment, a vector refers to a nucleic acid molecule capable of transporting another nucleic acid to which it has been linked. Vectors include nucleic acid molecules that are single-stranded, double-stranded, or partially double-stranded; nucleic acid molecules that comprise one or more free ends, no free ends (e.g., circular); nucleic acid molecules that comprise DNA, RNA, or both; and other varieties of polynucleotides known in the art. A vector may be a plasmid, e.g., a circular double stranded DNA loop into which additional DNA segments can be inserted, such as by standard molecular cloning techniques. Certain vectors may be capable of autonomous replication in a host cell into which they are introduced (e.g., bacterial vectors having a bacterial origin of replication and episomal mammalian vectors). Some vectors (e.g., non-episomal mammalian vectors) are integrated into the genome of a host cell upon introduction into the host cell, and thereby are replicated along with the host genome. In certain examples, vectors may be expression vectors, e.g., capable of directing the expression of genes to which they are operatively-linked. In some cases, the expression vectors may be for expression in eukaryotic cells. Common expression vectors of utility in recombinant DNA techniques are often in the form of plasmids.

[0560] Examples of vectors include pGEX, pMAL, pRITS, E. coli expression vectors (e.g., pTrc, pET 11d, yeast expression vectors (e.g., pYepSec1, pMFa, pJRY88, pYES2, and picZ, Baculovirus vectors (e.g., for expression in insect cells such as SF9 cells) (e.g., pAc series and the pVL series), mammalian expression vectors (e.g., pCDM8 and pMT2PC.

[0561] A vector may comprise i) one or more protein components encoding sequence(s), and/or ii) a single, or at least 2, at least 3, at least 4, at least 5, at least 6, at least 7, at least 8, at least 9, at least 10, at least 12, at least 14, at least 16, at least 32, at least 48, at least 50 guide RNA(s) encoding sequences. In a single vector there can be a promoter for each RNA coding sequence. Alternatively or additionally, in a single vector, there may be a promoter controlling (e.g., driving transcription and/or expression) multiple RNA encoding sequences.

[0562] Furthermore, that compositions or systems may be delivered via a vector, e.g., a separate vector or the same vector that is encoding the complex. When provided by a separate vector, the RNA that targets IscB polypeptide or CRISPR-associated IscB polypeptide nuclease expression can be administered sequentially or simultaneously. When administered sequentially, the RNA that targets IscB polypeptide or CRISPR-associated IscB polypeptide nuclease expression is to be delivered after the RNA that is intended for e.g. gene editing or gene engineering. This period may be a period of minutes (e.g. 5 minutes, 10 minutes, 20 minutes, 30 minutes, 45 minutes, 60 minutes). This period may be a period of hours (e.g. 2 hours, 4 hours, 6 hours, 8 hours, 12 hours, 24 hours). This period may be a period of days (e.g. 2 days, 3 days, 4 days, 7 days). This period may be a period of weeks (e.g. 2 weeks, 3 weeks, 4 weeks). This period may be a period of months (e.g. 2 months, 4 months, 8 months, 12 months). This period may be a period of years (2 years, 3 years, 4 years). In this fashion, the IscB polypeptide nuclease associates with a first hRNA molecule capable of hybridizing to a first target, such as a genomic locus or loci of interest and undertakes the function(s) desired of the system (e.g., gene engineering); and subsequently the IscB polypeptide or CRISPR-associated IscB polypeptide nuclease may then associate with the second hRNA molecule capable of hybridizing to the sequence comprising at least part of the IscB polypeptide or CRISPR-associated IscB polypeptide nuclease. Where the guide RNA targets the sequences encoding expression of the IscB polypeptide or CRISPR-associated IscB polypeptide nuclease, the enzyme becomes impeded and the system becomes self-inactivating. In the same manner, RNA that targets IscB polypeptide or CRISPR-associated IscB polypeptidenuclease expression applied via, for example liposome, lipofection, particles, microvesicles as explained herein, may be administered sequentially or simultaneously. Similarly, self-inactivation may be used for inactivation of one or more guide RNA used to target one or more targets.

### Regulatory Elements

[0563] A vector may comprise one or more regulatory elements. The regulatory element(s) may be operably linked to coding sequences of IscB polypeptide or CRISPR-associated IscB polypeptide nuclease, accessory proteins, ωRNA scaffold and/or guide RNA or combination thereof. The term “operably linked” is intended to mean that the nucleotide sequence of interest is linked to the regulatory element(s) in a manner that allows for expression of the nucleotide sequence (e.g. in an in vitro transcription/translation system or in a host cell when the vector is introduced into the host cell). In certain examples, a vector may comprise: a first regulatory element operably linked to a nucleotide sequence encoding a IscB polypeptide or CRISPR-associated IscB polypeptide nuclease, and a second regulatory element operably linked to a nucleotide sequence encoding a ωRNA or guide RNA.

[0564] Examples of regulatory elements include promoters, enhancers, internal ribosomal entry sites (IRES), and other expression control elements (e.g., transcription termination signals, such as polyadenylation signals and poly-U sequences). Such regulatory elements are described, for example, in Goeddel, GENE EXPRESSION TECHNOLOGY: METHODS IN ENZYMOLOGY 185, Academic Press, San Diego, Calif (1990). Regulatory elements include those that direct constitutive expression of a nucleotide sequence in many types of host cell and those that direct expression of the nucleotide sequence only in certain host cells (e.g., tissue-specific regulatory sequences). A tissue-specific promoter may direct expression primarily in a desired tissue of interest, such as muscle, neuron, bone, skin, blood, specific organs (e.g., liver, pancreas), or particular cell types (e.g., lymphocytes). Regulatory elements may also direct expression in a temporal-dependent manner, such as in a cell-cycle dependent or developmental stage-dependent manner, which may or may not also be tissue or cell-type specific.

[0565] Examples of promoters include one or more pol III promoter (e.g., 1, 2, 3, 4, 5, or more pol III promoters), one or more pol II promoters (e.g., 1, 2, 3, 4, 5, or more pol II promoters), one or more pol I promoters (e.g., 1, 2, 3, 4, 5, or more pol I promoters), or combinations thereof. Examples of pol III promoters include, but are not limited to, U6 and H1 promoters. Examples of pol II promoters include, but are not limited to, the retroviral Rous sarcoma virus (RSV) LTR promoter (optionally with the RSV enhancer), the cytomegalovirus (CMV) promoter (optionally with the CMV enhancer), the SV40 promoter, the dihydrofolate reductase promoter, the β-actin promoter, the phosphoglycerol kinase (PGK) promoter, and the EF1α promoter.

### Viral Vectors

[0566] The cargos may be delivered by viruses. In one embodiment, viral vectors are used. A viral vector may comprise virally-derived DNA or RNA sequences for packaging into a virus (e.g., retroviruses, replication defective retroviruses, adenoviruses, replication defective adenoviruses, and adeno-associated viruses). Viral vectors also include polynucleotides carried by a virus for transfection into a host cell. Viruses and viral vectors may be used for in vitro, ex vivo, and/or in vivo deliveries.

### Adeno Associated Virus (AAV)

[0567] The systems and compositions herein may be delivered by adeno associated virus (AAV). AAV vectors may be used for such delivery. AAV, of the Dependovirus genus and Parvoviridae family, is a single stranded DNA virus. In one embodiment, AAV may provide a persistent source of the provided DNA, as AAV delivered genomic material can exist indefinitely in cells, e.g., either as exogenous DNA or, with some modification, be directly integrated into the host DNA. In one embodiment, AAV do not cause or relate with any diseases in humans. The virus itself is able to efficiently infect cells while provoking little to no innate or adaptive immune response or associated toxicity.

[0568] Examples of AAV that can be used herein include AAV-1, AAV-2, AAV-3, AAV-4, AAV-5, AAV-6, AAV-8, and AAV-9. The type of AAV may be selected with regard to the cells to be targeted; e.g., one can select AAV serotypes 1, 2, 5 or a hybrid capsid AAV1, AAV2, AAV5 or any combination thereof for targeting brain or neuronal cells; and one can select AAV4 for targeting cardiac tissue. AAV8 is useful for delivery to the liver. AAV-2-based vectors were originally proposed for CFTR delivery to CF airways, other serotypes such as AAV-1, AAV-5, AAV-6, and AAV-9 exhibit improved gene transfer efficiency in a variety of models of the lung epithelium. Examples of cell types targeted by AAV are described in Grimm, D. et al, J. Virol. 82: 5887-5911 (2008)), and shown in Table 5 as follows:

TABLE 5
Examples of cell types targeted by AAV.

| | Cell Line | | | | | | | |
|---|---|---|---|---|---|---|---|---|
| | AAV- | AAV- | AAV- | AAV- | AAV- | AAV- | AAV- | AAV- |
| | 1 | 2 | 3 | 4 | 5 | 6 | 8 | 9 |
| Huh-7 | 13 | 100 | 2.5 | 0.0 | 0.1 | 10 | 0.7 | 0.0 |
| HEK293 | 25 | 100 | 2.5 | 0.1 | 0.1 | 5 | 0.7 | 0.1 |
| HeLa | 3 | 100 | 2.0 | 0.1 | 6.7 | 1 | 0.2 | 0.1 |
| HepG2 | 3 | 100 | 16.7 | 0.3 | 1.7 | 5 | 0.3 | ND |
| Hep1A | 20 | 100 | 0.2 | 1.0 | 0.1 | 1 | 0.2 | 0.0 |
| 911 | 17 | 100 | 11 | 0.2 | 0.1 | 17 | 0.1 | ND |
| CHO | 100 | 100 | 14 | 1.4 | 333 | 50 | 10 | 1.0 |
| COS | 33 | 100 | 33 | 3.3 | 5.0 | 14 | 2.0 | 0.5 |
| MeWo | 10 | 100 | 20 | 0.3 | 6.7 | 10 | 1.0 | 0.2 |
| NIH3T3 | 10 | 100 | 2.9 | 2.9 | 0.3 | 10 | 0.3 | ND |
| A549 | 14 | 100 | 20 | ND | 0.5 | 10 | 0.5 | 0.1 |
| HT1180 | 20 | 100 | 10 | 0.1 | 0.3 | 33 | 0.5 | 0.1 |
| Monocytes | 1111 | 100 | ND | ND | 125 | 1429 | ND | ND |
| Immature | 2500 | 100 | ND | ND | 222 | 2857 | ND | ND |
| DC | | | | | | | | |
| Mature DC | 2222 | 100 | ND | ND | 333 | 3333 | ND | ND |

[0569] The AAV particles may be created in HEK 293 T cells. Once particles with specific tropism have been created, they are used to infect the target cell line much in the same way that native viral particles do. This may allow for persistent presence of the components in the infected cell type, and what makes this version of delivery particularly suited to cases where long-term expression is desirable. Examples of doses and formulations for AAV that can be used include those describe in U.S. Pat. Nos. 8,454,972 and 8,404,658.

[0570] Various strategies may be used for delivery the systems and compositions herein with AAVs. In some examples, coding sequences of IscB polypeptide nuclease and ωRNA may be packaged directly onto one DNA plasmid vector and delivered via one AAV particle. In some examples, AAVs may be used to deliver ωRNAs into cells that have been previously engineered to express IscB polypeptide or CRISPR-associated IscB polypeptide nuclease. In some examples, coding sequences of IscB polypeptide or CRISPR-associated IscB polypeptide nuclease and ωRNA may be made into two separate AAV particles, which are used for co-transfection of target cells. In some examples, markers, tags, and other sequences may be packaged in the same AAV particles as coding sequences of IscB polypeptide or CRISPR-associated IscB polypeptide nuclease and/or ωRNAs.

### Lentiviruses

[0571] The systems and compositions herein may be delivered by lentiviruses. Lentiviral vectors may be used for such delivery. Lentiviruses are complex retroviruses that have the ability to infect and express their genes in both mitotic and post-mitotic cells.

[0572] Examples of lentiviruses include human immunodeficiency virus (HIV), which may use its envelope glycoproteins of other viruses to target a broad range of cell types; minimal non-primate lentiviral vectors based on the equine infectious anemia virus (EIAV), which may be used for ocular therapies. In an embodiment, self-inactivating lentiviral vectors with an siRNA targeting a common exon shared by HIV tat/rev, a nucleolar-localizing TAR decoy, and an anti-CCR5-specific hammerhead ribozyme (see, e.g., DiGiusto et al. (2010) Sci Transl Med 2:36ra43) may be used/and or adapted to the nucleic acid-targeting system herein.

[0573] Lentiviruses may be pseudo-typed with other viral proteins, such as the G protein of vesicular stomatitis virus. In doing so, the cellular tropism of the lentiviruses can be altered to be as broad or narrow as desired. In some cases, to improve safety, second- and third-generation lentiviral systems may split essential genes across three plasmids, which may reduce the likelihood of accidental reconstitution of viable viral particles within cells.

[0574] In some examples, leveraging the integration ability, lentiviruses may be used to create libraries of cells comprising various genetic modifications, e.g., for screening and/or studying genes and signaling pathways.

### Adenoviruses

[0575] The systems and compositions herein may be delivered by adenoviruses. Adenoviral vectors may be used for such delivery. Adenoviruses include nonenveloped viruses with an icosahedral nucleocapsid containing a double stranded DNA genome. Adenoviruses may infect dividing and non-dividing cells. In one embodiment, adenoviruses do not integrate into the genome of host cells, which may be used for limiting off-target effects of systems in gene editing applications.

### Viral Vehicles for Delivery to Plants

[0576] The systems and compositions may be delivered to plant cells using viral vehicles. In one embodiment, the compositions and systems may be introduced in the plant cells using a plant viral vector (e.g., as described in Scholthof et al. 1996, Annu Rev Phytopathol. 1996; 34:299-323). Such viral vector may be a vector from a DNA virus, e.g., geminivirus (e.g., cabbage leaf curl virus, bean yellow dwarf virus, wheat dwarf virus, tomato leaf curl virus, maize streak virus, tobacco leaf curl virus, or tomato golden mosaic virus) or nanovirus (e.g., Faba bean necrotic yellow virus). The viral vector may be a vector from an RNA virus, e.g., tobravirus (e.g., tobacco rattle virus, tobacco mosaic virus), potexvirus (e.g., potato virus X), or hordeivirus (e.g., barley stripe mosaic virus). The replicating genomes of plant viruses may be non-integrative vectors.

### Non-Viral Vehicles

[0577] The delivery vehicles may comprise non-viral vehicles. In general, methods and vehicles capable of delivering nucleic acids and/or proteins may be used for delivering the systems compositions herein. Examples of non-viral vehicles include lipid nanoparticles, cell-penetrating peptides (CPPs), DNA nanoclews, gold nanoparticles, streptolysin O, multifunctional envelope-type nanodevices (MENDs), lipid-coated mesoporous silica particles, and other inorganic nanoparticles.

### Lipid Particles

[0578] The delivery vehicles may comprise lipid particles, e.g., lipid nanoparticles (LNPs) and liposomes.

### Lipid Nanoparticles (LNPs)

[0579] LNPs may encapsulate nucleic acids within cationic lipid particles (e.g., liposomes), and may be delivered to cells with relative ease. In some examples, lipid nanoparticles do not contain any viral components, which helps minimize safety and immunogenicity concerns. Lipid particles may be used for in vitro, ex vivo, and in vivo deliveries. Lipid particles may be used for various scales of cell populations.

[0580] In some examples. LNPs may be used for delivering DNA molecules (e.g., those comprising coding sequences of IscB polypeptide nuclease and/or hRNA) and/or RNA molecules (e.g., mRNA of IscB polypeptide or CRISPR-associated IscB polypeptide nuclease, ωRNA or gRNAs). In certain cases, LNPs may be use for delivering RNP complexes of IscB polypeptide or CRISPR-associated IscB polypeptide/ωRNA.

[0581] Components in LNPs may comprise cationic lipids 1,2-dilineoyl-3-dimethylammonium-propane (DLinDAP), 1,2-dilinoleyloxy-3-N,N-dimethylaminopropane (DLinDMA), 1,2-dilinoleyloxyketo-N,N-dimethyl-3-aminopropane (DLinK-DMA), 1,2-dilinoleyl-4-(2-dimethylaminoethyl)-[1,3]-dioxolane (DLinKC2-DMA), (3-o-[2″-(methoxypolyethyleneglycol 2000) succinoyl]-1,2-dimyristoyl-sn-glycol (PEG-S-DMG), R-3-[(ro-methoxy-poly(ethylene glycol)2000) carbamoyl]-1,2-dimyristyloxlpropyl-3-amine (PEG-C-DOMG, and any combination thereof. Preparation of LNPs and encapsulation may be adapted from Rosin et al, Molecular Therapy, vol. 19, no. 12, pages 1286-2200, December 2011).

### Liposomes

[0582] In one embodiment, a lipid particle may be liposome. Liposomes are spherical vesicle structures composed of a uni- or multilamellar lipid bilayer surrounding internal aqueous compartments and a relatively impermeable outer lipophilic phospholipid bilayer. In one embodiment, liposomes are biocompatible, nontoxic, can deliver both hydrophilic and lipophilic drug molecules, protect their cargo from degradation by plasma enzymes, and transport their load across biological membranes and the blood brain barrier (BBB).

[0583] Liposomes can be made from several different types of lipids, e.g., phospholipids. A liposome may comprise natural phospholipids and lipids such as 1,2-distearoryl-sn-glycero-3-phosphatidyl choline (DSPC), sphingomyelin, egg phosphatidylcholines, monosialoganglioside, or any combination thereof.

[0584] Several other additives may be added to liposomes in order to modify their structure and properties. For instance, liposomes may further comprise cholesterol, sphingomyelin, and/or 1,2-dioleoyl-sn-glycero-3-phosphoethanolamine (DOPE), e.g., to increase stability and/or to prevent the leakage of the liposomal inner cargo.

### Stable Nucleic-Acid-Lipid Particles (SNALPs)

[0585] In one embodiment, the lipid particles may be stable nucleic acid lipid particles (SNALPs). SNALPs may comprise an ionizable lipid (DLinDMA) (e.g., cationic at low pH), a neutral helper lipid, cholesterol, a diffusible polyethylene glycol (PEG)-lipid, or any combination thereof. In some examples, SNALPs may comprise synthetic cholesterol, dipalmitoylphosphatidylcholine, 3-N-[(w-methoxy polyethylene glycol)2000)carbamoyl]-1,2-dimyrestyloxypropylamine, and cationic 1,2-dilinoleyloxy-3-N,Ndimethylaminopropane. In some examples, SNALPs may comprise synthetic cholesterol, 1,2-distearoyl-sn-glycero-3-phosphocholine, PEG-cDMA, and 1,2-dilinoleyloxy-3-(N;N-dimethyl)aminopropane (DLinDMA)

### Other Lipids

[0586] The lipid particles may also comprise one or more other types of lipids, e.g., cationic lipids, such as amino lipid 2,2-dilinoleyl-4-dimethylaminoethyl-[1,3]-dioxolane (DLin-KC2-DMA), DLin-KC2-DMA4, C12-200 and colipids disteroylphosphatidyl choline, cholesterol, and PEG-DMG.

### Lipoplexes/Polyplexes

[0587] In one embodiment, the delivery vehicles comprise lipoplexes and/or polyplexes. Lipoplexes may bind to negatively charged cell membrane and induce endocytosis into the cells. Examples of lipoplexes may be complexes comprising lipid(s) and non-lipid components. Examples of lipoplexes and polyplexes include FuGENE-6 reagent, a non-liposomal solution containing lipids and other components, zwitterionic amino lipids (ZALs), Ca2p (e.g., forming DNA/Ca²⁺ microcomplexes), polyethenimine (PEI) (e.g., branched PEI), and poly(L-lysine) (PLL).

### Cell Penetrating Peptides

[0588] In one embodiment, the delivery vehicles comprise cell penetrating peptides (CPPs). CPPs are short peptides that facilitate cellular uptake of various molecular cargo (e.g., from nanosized particles to small chemical molecules and large fragments of DNA).

[0589] CPPs may be of different sizes, amino acid sequences, and charges. In some examples, CPPs can translocate the plasma membrane and facilitate the delivery of various molecular cargoes to the cytoplasm or an organelle. CPPs may be introduced into cells via different mechanisms, e.g., direct penetration in the membrane, endocytosis-mediated entry, and translocation through the formation of a transitory structure.

[0590] CPPs may have an amino acid composition that either contains a high relative abundance of positively charged amino acids such as lysine or arginine or has sequences that contain an alternating pattern of polar/charged amino acids and non-polar, hydrophobic amino acids. These two types of structures are referred to as polycationic or amphipathic, respectively. A third class of CPPs are the hydrophobic peptides, containing only apolar residues, with low net charge or have hydrophobic amino acid groups that are crucial for cellular uptake. Another type of CPPs is the trans-activating transcriptional activator (Tat) from Human Immunodeficiency Virus 1 (HIV-1). Examples of CPPs include to Penetratin, Tat (48-60), Transportan, and (R-AhX-R4) (Ahx refers to aminohexanoyl), Kaposi fibroblast growth factor (FGF) signal peptide sequence, integrin β3 signal peptide sequence, polyarginine peptide Args sequence, Guanine rich-molecular transporters, and sweet arrow peptide. Examples of CPPs and related applications also include those described in U.S. Pat. No. 8,372,951.

[0591] CPPs can be used for in vitro and ex vivo work quite readily, and extensive optimization for each cargo and cell type is usually required. In some examples, CPPs may be covalently attached to the IscB polypeptide nuclease directly, which is then complexed with the hRNA and delivered to cells. In some examples, separate delivery of CPP-IscB and CPP-hRNA to multiple cells may be performed. CPP may also be used to delivery RNPs.

[0592] CPPs may be used to deliver the compositions and systems to plants. In some examples, CPPs may be used to deliver the components to plant protoplasts, which are then regenerated to plant cells and further to plants.

### DNA Nanoclews

[0593] In one embodiment, the delivery vehicles comprise DNA nanoclews. A DNA nanoclew refers to a sphere-like structure of DNA (e.g., with a shape of a ball of yarn). The nanoclew may be synthesized by rolling circle amplification with palindromic sequences that aide in the self-assembly of the structure. The sphere may then be loaded with a payload. An example of DNA nanoclew is described in Sun W et al, J Am Chem Soc. 2014 Oct. 22; 136(42):14722-5; and Sun W et al, Angew Chem Int Ed Engl. 2015 Oct. 5; 54(41):12029-33. DNA nanoclew may have a palindromic sequences to be partially complementary to the guide RNA within the IscB polypeptide nuclease:hRNA ribonucleoprotein complex. A DNA nanoclew may be coated, e.g., coated with PEI to induce endosomal escape.

### Gold Nanoparticles

[0594] In one embodiment, the delivery vehicles comprise gold nanoparticles (also referred to AuNPs or colloidal gold). Gold nanoparticles may form complex with cargos, e.g., IscB polypeptide nuclease:hRNA RNP. Gold nanoparticles may be coated, e.g., coated in a silicate and an endosomal disruptive polymer, PAsp(DET). Examples of gold nanoparticles include AuraSense Therapeutics' Spherical Nucleic Acid (SNA™) constructs, and those described in Mout R, et al. (2017). ACS Nano 11:2452-8; Lee K, et al. (2017). Nat Biomed Eng 1:889-901.

iTOP

[0595] In one embodiment, the delivery vehicles comprise iTOP. iTOP refers to a combination of small molecules drives the highly efficient intracellular delivery of native proteins, independent of any transduction peptide. iTOP may be used for induced transduction by osmocytosis and propanebetaine, using NaCl-mediated hyperosmolality together with a transduction compound (propanebetaine) to trigger macropinocytotic uptake into cells of extracellular macromolecules. Examples of iTOP methods and reagents include those described in D'Astolfo D S, Pagliero R J, Pras A, et al. (2015). Cell 161:674-690.

### Polymer-Based Particles

[0596] In one embodiment, the delivery vehicles may comprise polymer-based particles (e.g., nanoparticles). In one embodiment, the polymer-based particles may mimic a viral mechanism of membrane fusion. The polymer-based particles may be a synthetic copy of Influenza virus machinery and form transfection complexes with various types of nucleic acids ((siRNA, miRNA, plasmid DNA or shRNA, mRNA) that cells take up via the endocytosis pathway, a process that involves the formation of an acidic compartment. The low pH in late endosomes acts as a chemical switch that renders the particle surface hydrophobic and facilitates membrane crossing. Once in the cytosol, the particle releases its payload for cellular action. This Active Endosome Escape technology is safe and maximizes transfection efficiency as it is using a natural uptake pathway. In one embodiment, the polymer-based particles may comprise alkylated and carboxyalkylated branched polyethylenimine. In some examples, the polymer-based particles are VIROMER, e.g., VIROMER RNAi, VIROMER RED, VIROMER mRNA. Example methods of delivering the systems and compositions herein include those described in Bawage S S et al., Synthetic mRNA expressed Cas13a mitigates RNA virus infections, www.biorxiv.org/content/10.1101/370460v1.full doi: doi.org/10.1101/370460, Viromer® RED, a powerful tool for transfection of keratinocytes. doi: 10.13140/RG.2.2.16993.61281, Viromer® Transfection—Factbook 2018: technology, product overview, users' data., doi:10.13140/RG.2.2.23912.16642.

### Streptolysin O (SLO)

[0597] The delivery vehicles may be streptolysin O (SLO). SLO is a toxin produced by Group A streptococci that works by creating pores in mammalian cell membranes. SLO may act in a reversible manner, which allows for the delivery of proteins (e.g., up to 100 kDa) to the cytosol of cells without compromising overall viability. Examples of SLO include those described in Sierig G, et al. (2003). Infect Immun 71:446-55; Walev I, et al. (2001). Proc Natl Acad Sci USA 98:3185-90; Teng K W, et al. (2017). Elife 6:e25460.

### Multifunctional Envelope-Type Nanodevice (MEND)

[0598] The delivery vehicles may comprise multifunctional envelope-type nanodevice (MENDs). MENDs may comprise condensed plasmid DNA, a PLL core, and a lipid film shell. A MEND may further comprise cell-penetrating peptide (e.g., stearyl octaarginine). The cell penetrating peptide may be in the lipid shell. The lipid envelope may be modified with one or more functional components, e.g., one or more of: polyethylene glycol (e.g., to increase vascular circulation time), ligands for targeting of specific tissues/cells, additional cell-penetrating peptides (e.g., for greater cellular delivery), lipids to enhance endosomal escape, and nuclear delivery tags. In some examples, the MEND may be a tetra-lamellar MEND (T-MEND), which may target the cellular nucleus and mitochondria. In certain examples, a MEND may be a PEG-peptide-DOPE-conjugated MEND (PPD-MEND), which may target bladder cancer cells. Examples of MENDs include those described in Kogure K, et al. (2004). J Control Release 98:317-23; Nakamura T, et al. (2012). Acc Chem Res 45:1113-21.

### Lipid-Coated Mesoporous Silica Particles

[0599] The delivery vehicles may comprise lipid-coated mesoporous silica particles. Lipid-coated mesoporous silica particles may comprise a mesoporous silica nanoparticle core and a lipid membrane shell. The silica core may have a large internal surface area, leading to high cargo loading capacities. In one embodiment, pore sizes, pore chemistry, and overall particle sizes may be modified for loading different types of cargos. The lipid coating of the particle may also be modified to maximize cargo loading, increase circulation times, and provide precise targeting and cargo release. Examples of lipid-coated mesoporous silica particles include those described in Du X, et al. (2014). Biomaterials 35:5580-90; Durfee P N, et al. (2016). ACS Nano 10:8325-45.

### Inorganic Nanoparticles

[0600] The delivery vehicles may comprise inorganic nanoparticles. Examples of inorganic nanoparticles include carbon nanotubes (CNTs) (e.g., as described in Bates K and Kostarelos K. (2013). Adv Drug Deliv Rev 65:2023-33.), bare mesoporous silica nanoparticles (MSNPs) (e.g., as described in Luo G F, et al. (2014). Sci Rep 4:6064), and dense silica nanoparticles (SiNPs) (as described in Luo D and Saltzman W M. (2000). Nat Biotechnol 18:893-5).

### Exosomes

[0601] The delivery vehicles may comprise exosomes. Exosomes include membrane bound extracellular vesicles, which can be used to contain and delivery various types of biomolecules, such as proteins, carbohydrates, lipids, and nucleic acids, and complexes thereof (e.g., RNPs). Examples of exosomes include those described in Schroeder A, et al., J Intern Med. 2010 January; 267(1):9-21; El-Andaloussi S, et al., Nat Protoc. 2012 December; 7(12):2112-26; Uno Y, et al., Hum Gene Ther. 2011 June; 22(6):711-9; Zou W, et al., Hum Gene Ther. 2011 April; 22(4):465-75.

[0602] In some examples, the exosome may form a complex (e.g., by binding directly or indirectly) to one or more components of the cargo. In certain examples, a molecule of an exosome may be fused with first adapter protein and a component of the cargo may be fused with a second adapter protein. The first and the second adapter protein may specifically bind each other, thus associating the cargo with the exosome. Examples of such exosomes include those described in Ye Y, et al., Biomater Sci. 2020 Apr. 28. doi: 10.1039/dObm00427h.

### Genetically Modified Cells and Organisms

[0603] The present disclosure further provides cells comprising one or more components of the compositions and systems herein, e.g., the IscB polypeptide or CRISPR-associated IscB polypeptide nuclease and/or ωRNA(s). Also provided include cells modified by the systems and methods herein, and cell cultures, tissues, organs, organism comprising such cells or progeny thereof. In one embodiment, the present disclosure provides a method of modifying an cell or organism. The cell may be a prokaryotic cell or a eukaryotic cell. The cell may be a mammalian cell. The mammalian cell many be a non-human primate, bovine, porcine, rodent or mouse cell. The cell may be a non-mammalian eukaryotic cell such as poultry, fish or shrimp. The cell may be a therapeutic T cell or antibody-producing B-cell. The cell may also be a plant cell. The plant cell may be of a crop plant such as cassava, corn, sorghum, wheat, or rice. The plant cell may also be of an algae, tree or vegetable. The modification introduced to the cell by the present invention may be such that the cell and progeny of the cell are altered for improved production of biologic products such as an antibody, starch, alcohol or other desired cellular output. The modification introduced to the cell by the present invention may be such that the cell and progeny of the cell include an alteration that changes the biologic product produced.

[0604] In one embodiment, one or more polynucleotide molecules, vectors, or vector systems driving expression of one or more elements of the compositions, systems, or delivery systems comprising one or more elements of the nucleic acid-targeting system are introduced into a host cell such that expression of the elements of the nucleic acid-targeting system direct formation of a nucleic acid-targeting complex at one or more target sites. In an embodiment of the invention the host cell may be a eukaryotic cell, a prokaryotic cell, or a plant cell.

[0605] In one embodiment, the host cell is a cell of a cell line. Cell lines are available from a variety of sources known to those with skill in the art (see, e.g., the American Type Culture Collection (ATCC) (Manassas, Va.)). In one embodiment, a cell transfected with one or more vectors described herein is used to establish a new cell line comprising one or more vector-derived sequences. In one embodiment, a cell transiently transfected with the components of a system as described herein (such as by transient transfection of one or more vectors, or transfection with RNA), and modified through the activity of a complex, is used to establish a new cell line comprising cells containing the modification but lacking any other exogenous sequence. In one embodiment, cells transiently or non-transiently transfected with one or more vectors described herein, or cell lines derived from such cells are used in assessing one or more test compounds.

[0606] Further intended are isolated human cells or tissues, plants or non-human animals comprising one or more of the polynucleotide molecules, vectors, vector systems, or cells described in any of the embodiments herein. In an aspect, host cells and cell lines modified by or comprising the compositions, systems or modified enzymes of present invention are provided, including (isolated) stem cells, and progeny thereof.

[0607] In an embodiment, the plants or non-human animals comprise at least one of the system components, polynucleotide molecules, vectors, vector systems, or cells described in any of the embodiments herein at least one tissue type of the plant or non-human animal. In an embodiment, non-human animals comprise at least one of the system components, polynucleotide molecules, vectors, vector systems, or cells described in any of the embodiments herein in at least one tissue type. In an embodiment, the presence of the system components is transient, in that they are degraded over time. In an embodiment, expression of the components of the systems and compositions described in any of the embodiments comprised in polynucleotide molecules, vectors, vector systems, or cells is limited to certain tissue types or regions in the plant or non-human animal. In an embodiment, the expression of the components of the systems and compositions described in any of the embodiments comprised in polynucleotide molecules, vectors, vector systems, or cells is dependent of a physiological cue. In an embodiment, expression of the components of the systems and compositions described in any of the embodiments comprised in polynucleotide molecules, vectors, vector systems, or cells may be triggered by an exogenous molecule. In an embodiment, expression of the components of the systems and compositions described in any of the embodiments comprised in polynucleotide molecules, vectors, vector systems, or cells is dependent on the expression of a non-cas molecule in the plant or non-human animal.

### Applications and Uses in General

[0608] The systems, the vector systems, the vectors and the compositions described herein may be used in various nucleic acids-targeting applications, altering or modifying synthesis of a gene product, such as a protein, nucleic acids cleavage, nucleic acids editing, nucleic acids splicing; trafficking of target nucleic acids, tracing of target nucleic acids, isolation of target nucleic acids, visualization of target nucleic acids, etc.

[0609] Aspects of the invention thus also encompass methods and uses of the compositions and systems described herein in genome engineering, e.g. for altering or manipulating the expression of one or more genes or the one or more gene products, in prokaryotic or eukaryotic cells, in vitro, in vivo or ex vivo. In some examples, the target polynucleotides are target sequences within genomic DNA, including nuclear genomic DNA, mitochondrial DNA, or chloroplast DNA.

[0610] Typically, in the context of a nucleic acid-targeting system, formation of a nucleic acid-targeting complex (comprising a ωRNA or guide RNA hybridized to a target sequence and complexed with one or more nucleic acid-targeting effector proteins) results in cleavage of one or both DNA or RNA strands in or near (e.g., within 1, 2, 3, 4, 5, 6, 7, 8, 9, 10, 20, 50, or more base pairs from) the target sequence. As used herein the term “sequence(s) associated with a target locus of interest” refers to sequences near the vicinity of the target sequence (e.g. within 1, 2, 3, 4, 5, 6, 7, 8, 9, 10, 20, 50, or more base pairs from the target sequence, wherein the target sequence is comprised within a target locus of interest).

[0611] In one embodiment, the present disclosure provides a method of targeting a polynucleotide, comprising contacting a sample (such as cell, population of cells, tissue, organ, or an organism) that comprises a target polynucleotide with the composition, systems, polynucleotide(s), or vector(s). The contacting may result in modification of a gene product or modification of the amount or expression of a gene product. In some examples, the target sequence of the polynucleotide is a disease-associated target sequence.

[0612] In one embodiment, the present disclosure provides a method of modifying target polynucleotides comprising delivering the composition, the one or more polynucleotides of 2, or one or more vectors to a cell or population of cells comprising the target polynucleotides, wherein the complex directs the reverse transcriptase to the target sequence and the reverse transcriptase facilitates insertion of the donor sequence from the ωRNA into the target polynucleotide.

[0613] Examples of target polynucleotides include a sequence associated with a signaling biochemical pathway, e.g., a signaling biochemical pathway-associated gene or polynucleotide. Examples of target polynucleotides include a disease associated gene or polynucleotide. A “disease-associated” gene or polynucleotide refers to any gene or polynucleotide which is yielding transcription or translation products at an abnormal level or in an abnormal form in cells derived from a disease-affected tissues compared with tissues or cells of a non-disease control. It may be a gene that becomes expressed at an abnormally high level; it may be a gene that becomes expressed at an abnormally low level, where the altered expression correlates with the occurrence and/or progression of the disease. A disease-associated gene also refers to a gene possessing mutation(s) or genetic variation that is directly responsible or is in linkage disequilibrium with a gene(s) that is responsible for the etiology of a disease. The transcribed or translated products may be known or unknown, and may be at a normal or abnormal level.

[0614] The target polynucleotide of a complex can be any polynucleotide endogenous or exogenous to the eukaryotic cell. For example, the target polynucleotide can be a polynucleotide residing in the nucleus of the eukaryotic cell. The target polynucleotide can be a sequence coding a gene product (e.g., a protein) or a non-coding sequence (e.g., a regulatory polynucleotide or a junk DNA). Without wishing to be bound by theory, it is believed that the target sequence should be associated with a TAM (target adjacent motif); that is, a short sequence recognized by the complex. The precise sequence and length requirements for the TAM differ depending on the IscB polypeptide or CRISPR-associated IscB polypeptide nuclease used, but TAMs are typically 2-5 base pair sequences adjacent the protospacer (that is, the target sequence) A skilled person will be able to identify further TAM sequences for use with a given IscB polypeptide or CRISPR-associated IscB polypeptide nuclease. Further, engineering of the TAM Interacting domain may allow programing of TAM specificity, improve target site recognition fidelity, and increase the versatility of the IscB polypeptide nuclease, genome engineering platform. IscB polypeptide or CRISPR-associated IscB polypeptide nuclease may be engineered to alter their TAM specificity.

[0615] In an embodiment the IscB TAM is ATNA where N is any nucleotide. In an embodiment, the IscB TAM is ATGA, ATAA, ATAAA, or ATN. In one embodiment, the IscB is Ignatius tetrasporus and the TAM is NNG.

[0616] Examples of target polynucleotides include a sequence associated with a signaling biochemical pathway, e.g., a signaling biochemical pathway-associated gene or polynucleotide. Examples of target polynucleotides include a disease associated gene or polynucleotide. A “disease-associated” gene or polynucleotide refers to any gene or polynucleotide which is yielding transcription or translation products at an abnormal level or in an abnormal form in cells derived from a disease-affected tissues compared with tissues or cells of a non-disease control. It may be a gene that becomes expressed at an abnormally high level; it may be a gene that becomes expressed at an abnormally low level, where the altered expression correlates with the occurrence and/or progression of the disease. A disease-associated gene also refers to a gene possessing mutation(s) or genetic variation that is directly responsible or is in linkage disequilibrium with a gene(s) that is responsible for the etiology of a disease. The transcribed or translated products may be known or unknown, and may be at a normal or abnormal level.

[0617] Aspects of the invention relate to a method of targeting a polynucleotide, comprising contacting a sample that comprises the polynucleotide with a composition, system or IscB polypeptide or CRISPR-associated IscB polypeptide nuclease as described in any embodiment herein, a delivery system comprising a composition, system or IscB polypeptide or CRISPR-associated IscB polypeptide nuclease as described in any embodiment herein, a polynucleotide comprising a composition, system or IscB polypeptide or CRISPR-associated IscB polypeptide nuclease as described in any embodiment herein, a vector comprising a composition, system or IscB polypeptide or CRISPR-associated IscB polypeptide nuclease as described in any embodiment herein, or a vector system comprising a composition, system or IscB polypeptide or CRISPR-associated IscB polypeptide nuclease as described in any embodiment herein. In an embodiment, a target polynucleotide is contacted with at least two different composition, system or IscB polypeptide or CRISPR-associated IscB polypeptide nucleases. In further embodiments, the two different IscB polypeptide nuclease have different target polynucleotide specificities, or degrees of specificity. In an embodiment, the two different IscB polypeptide or CRISPR-associated IscB polypeptide nuclease have a different TAM specificity.

[0618] Also envisaged are methods of targeting a polynucleotide, comprising contacting a sample that comprises the polynucleotide with the composition and systems, vectors, polynucleotides, herein wherein contacting results in modification of a gene product or modification of the amount or expression of a gene product. In an embodiment, the expression of the targeted gene product is increased by the method. In an embodiment, the expression of the targeted gene product is increased by at least 10%, at least 15%, at least 20%, at least 25%, at least 30%, at least 35%, at least 40%, at least 45%, at least 50%, at least 55%, at least 60%, at least 65%, at least 70%, at least 75%, at least 80%, at least 85%, p at least 90%, at least 95%, 100%. In an embodiment, the expression of the targeted gene product is increased at least 1.5-fold, at least 2-fold, at least 2.5-fold, at least 3-fold, at least 3.5-fold, at least 3.5-fold, at least 4-fold, at least 4.5-fold, at least 5-fold, at least 10-fold, at least 10-fold, at least 15-fold, at least 20-fold, at least 25-fold, at least 50-fold, at least 100-fold. In an embodiment, the expression of the targeted gene product is reduced by at least 10%, by at least 15%, by at least 20%, by at least 25%, by at least 30%, by at least 35%, by at least 40%, by at least 45%, by at least 50%, by at least 55%, by at least 60%, by at least 65%, by at least 70%, by at least 75%, by at least 80%, by at least 85%, by at least 90%, by at least 95%, by at least 100%. In an embodiment, the expression of the targeted gene product is reduced at least 1.5-fold, at least 2-fold, at least 2.5-fold, at least 3-fold, at least 3.5-fold, at least 3.5-fold, at least 4-fold, at least 4.5-fold, at least 5-fold, at least 10-fold, at least 10-fold, at least 15-fold, at least 20-fold, at least 25-fold, at least 50-fold, at least 100-fold. In alternative embodiments, the expression of the targeted gene product is reduced by the method. In further embodiments, expression of the targeted gene may be completely eliminated, or may be considered eliminated as remnant expression levels of the targeted gene fall below the detection limit of methods known in the art that are used to quantify, detect, or monitor expression levels of genes.

[0619] In one embodiment, one or more polynucleotide molecules, vectors, or vector systems driving expression of one or more elements of a nucleic acid-targeting system or delivery systems comprising one or more elements of the nucleic acid-targeting system are introduced into a host cell such that expression of the elements of the nucleic acid-targeting system direct formation of a nucleic acid-targeting complex at one or more target sites. In an embodiment of the invention the host cell may be a eukaryotic cell, a prokaryotic cell, or a plant cell.

[0620] In one embodiment, the host cell is a cell of a cell line. Cell lines are available from a variety of sources known to those with skill in the art (see, e.g., the American Type Culture Collection (ATCC) (Manassas, Va.)). In one embodiment, a cell transfected with one or more vectors described herein is used to establish a new cell line comprising one or more vector-derived sequences. In one embodiment, a cell transiently transfected with the components of a composition or system as described herein (such as by transient transfection of one or more vectors, or transfection with RNA), and modified through the activity of a complex, is used to establish a new cell line comprising cells containing the modification but lacking any other exogenous sequence. In one embodiment, cells transiently or non-transiently transfected with one or more vectors described herein, or cell lines derived from such cells are used in assessing one or more test compounds.

[0621] Further intended are isolated human cells or tissues, plants or non-human animals comprising one or more of the polynucleotide molecules, vectors, vector systems, or cells described in any of the embodiments herein. In an aspect, host cells and cell lines modified by or comprising the compositions, systems or modified enzymes of present invention are provided, including (isolated) stem cells, and progeny thereof.

[0622] In an embodiment, the plants or non-human animals comprise at least one of the compositions, polynucleotide molecules, vectors, vector systems, or cells described in any of the embodiments herein at least one tissue type of the plant or non-human animal. In certain embodiment, non-human animals comprise at least one of the compositions, polynucleotide molecules, vectors, vector systems, or cells described in any of the embodiments herein in at least one tissue type. In an embodiment, the presence of the compositions is transient, in that they are degraded over time. In an embodiment, expression of the compositions described in any of the embodiments comprised in polynucleotide molecules, vectors, vector systems, or cells is limited to certain tissue types or regions in the plant or non-human animal. In an embodiment, the expression of the compositions described in any of the embodiments comprised in polynucleotide molecules, vectors, vector systems, or cells is dependent of a physiological cue. In an embodiment, expression of the compositions described in any of the embodiments comprised in polynucleotide molecules, vectors, vector systems, or cells may be triggered by an exogenous molecule. In an embodiment, expression of the compositions described in any of the embodiments comprised in polynucleotide molecules, vectors, vector systems, or cells is dependent on the expression of a non-Cas molecule in the plant or non-human animal.

[0623] In one aspect, the invention provides methods for using one or more elements of a nucleic acid-targeting system. The nucleic acid-targeting complex of the invention provides an effective means for modifying a target DNA or RNA (single or double stranded, linear or super-coiled). The nucleic acid-targeting complex of the invention has a wide variety of utility including modifying (e.g., deleting, inserting, translocating, inactivating, activating) a target DNA or RNA in a multiplicity of cell types. As such, the nucleic acid-targeting complex of the invention has a broad spectrum of applications in, e.g., gene therapy, drug screening, disease diagnosis, and prognosis. An exemplary nucleic acid-targeting complex comprises a DNA or RNA-targeting effector protein complexed with a ωRNA or guide RNA hybridized to a target sequence within the target locus of interest.

[0624] In one embodiment, this invention provides a method of cleaving a target polynucleotide. The method may comprise modifying a target polynucleotide using a nucleic acid-targeting complex that binds to the target polynucleotide and effect cleavage of said target polynucleotide. In an embodiment, the nucleic acid-targeting complex of the invention, when introduced into a cell, may create a break (e.g., a single or a double strand break) in the polynucleotide sequence. For example, the method can be used to cleave a disease polynucleotide in a cell. For example, an exogenous template comprising a sequence to be integrated flanked by an upstream sequence and a downstream sequence may be introduced into a cell. The upstream and downstream sequences share sequence similarity with either side of the site of integration in the polynucleotide. The exogenous template comprises a sequence to be integrated (e.g., a mutated RNA). The sequence for integration may be a sequence endogenous or exogenous to the cell. Examples of a sequence to be integrated include polynucleotide encoding a protein or a non-coding RNA (e.g., a microRNA). Thus, the sequence for integration may be operably linked to an appropriate control sequence or sequences. Alternatively, the sequence to be integrated may provide a regulatory function. The upstream and downstream sequences in the recombination template are selected to promote recombination between the RNA sequence of interest and the recombination. The upstream sequence is a polynucleotide sequence that shares sequence similarity with the sequence upstream of the targeted site for integration. Similarly, the downstream sequence is a polynucleotide sequence that shares sequence similarity with the polynucleotide sequence downstream of the targeted site of integration. The upstream and downstream sequences in the recombination template can have 75%, 80%, 85%, 90%, 95%, or 100% sequence identity with the targeted sequence. Preferably, the upstream and downstream sequences in the recombination template have about 95%, 96%, 97%, 98%, 99%, or 100% sequence identity with the targeted sequence. In some methods, the upstream and downstream sequences in the recombination template have about 99% or 100% sequence identity with the targeted sequence. An upstream or downstream sequence may comprise from about 20 bp to about 2500 bp, for example, about 50, 100, 200, 300, 400, 500, 600, 700, 800, 900, 1000, 1100, 1200, 1300, 1400, 1500, 1600, 1700, 1800, 1900, 2000, 2100, 2200, 2300, 2400, or 2500 bp. In some methods, the exemplary upstream or downstream sequence have about 200 bp to about 2000 bp, about 600 bp to about 1000 bp, or more particularly about 700 bp to about 1000 bp. In some methods, the recombination template may further comprise a marker. Such a marker may make it easy to screen for targeted integrations. Examples of suitable markers include restriction sites, fluorescent proteins, or selectable markers. The recombination template of the invention can be constructed using recombinant techniques (see, for example, Sambrook et al., 2001 and Ausubel et al., 1996). In a method for modifying a target sequence by integrating an recombination template, a break (e.g., double or single stranded break in double or single stranded DNA or RNA) is introduced into the DNA or RNA sequence by the nucleic acid-targeting complex, the break is repaired via homologous recombination with an recombination template such that the template is integrated into the target. The presence of a double-stranded break facilitates integration of the template. In other embodiments, this invention provides a method of modifying expression of a RNA in a eukaryotic cell. The method comprises increasing or decreasing expression of a target polynucleotide by using a nucleic acid-targeting complex that binds to the DNA or RNA (e.g., mRNA or pre-mRNA). In some methods, a target can be inactivated to affect the modification of the expression in a cell. For example, upon the binding of a nucleic acid-targeting complex to a target sequence in a cell, the target is inactivated such that the sequence is not translated, the coded protein is not produced, or the sequence does not function as the wild-type sequence does. For example, a protein or microRNA coding sequence may be inactivated such that the protein or microRNA or pre-microRNA transcript is not produced. The target of a nucleic acid-targeting complex can be any polynucleotide endogenous or exogenous to the eukaryotic cell. For example, the target polynucleotide can be a polynucleotide residing in the nucleus of the eukaryotic cell. The target polynucleotide can be a sequence coding a gene product (e.g., a protein) or a non-coding sequence (e.g., ncRNA, lncRNA, tRNA, or rRNA). Examples of target RNA include a sequence associated with a signaling biochemical pathway, e.g., a signaling biochemical pathway-associated polynucleotide. Examples of target polynucleotide include a disease associated polynucleotide. A “disease-associated” polynucleotide refers to any polynucleotide which is yielding translation products at an abnormal level or in an abnormal form in cells derived from a disease-affected tissues compared with tissues or cells of a non-disease control. It may be a gene that becomes expressed at an abnormally high level; it may be a gene that becomes expressed at an abnormally low level, where the altered expression correlates with the occurrence and/or progression of the disease. A disease-associated polynucleotide also refers to a gene possessing mutation(s) or genetic variation that is directly responsible or is in linkage disequilibrium with a gene(s) that is responsible for the etiology of a disease. The translated products may be known or unknown, and may be at a normal or abnormal level. The target RNA of a nucleic acid-targeting complex can be any polynucleotide endogenous or exogenous to the eukaryotic cell. For example, the target RNA can be a RNA residing in the nucleus of the eukaryotic cell. The target polynucleotide can be a sequence coding a gene product (e.g., a protein) or a non-coding sequence (e.g., ncRNA, lncRNA, tRNA, or rRNA).

[0625] In one embodiment, the method may comprise allowing a compositions to bind to the target DNA or RNA to effect cleavage of said target DNA or RNA thereby modifying the target DNA or RNA, wherein the nucleic acid-targeting complex comprises a nucleic acid-targeting effector protein complexed with a guide RNA hybridized to a target sequence within said target DNA or RNA. In one aspect, the invention provides a method of modifying expression of DNA or RNA in a eukaryotic cell. In one embodiment, the method comprises allowing a nucleic acid-targeting complex to bind to the DNA or RNA such that said binding results in increased or decreased expression of said DNA or RNA; wherein the nucleic acid-targeting complex comprises a nucleic acid-targeting effector protein complexed with a ωRNA or guide RNA. Similar considerations and conditions apply as above for methods of modifying a target DNA or RNA. In fact, these sampling, culturing and re-introduction options apply across the aspects of the present invention. In one aspect, the invention provides for methods of modifying a target DNA or RNA in a eukaryotic cell, which may be in vivo, ex vivo or in vitro. In one embodiment, the method comprises sampling a cell or population of cells from a human or non-human animal, and modifying the cell or cells. Culturing may occur at any stage ex vivo. The cell or cells may even be re-introduced into the non-human animal or plant. For re-introduced cells it is particularly preferred that the cells are stem cells. The compositions as described in any embodiment herein may be used to detect nucleic acid identifiers. Nucleic acid identifiers are non-coding nucleic acids that may be used to identify a particular article. Example nucleic acid identifiers, such as DNA watermarks, are described in Heider and Barnekow. “DNA watermarks: A proof of concept” BMC Molecular Biology 9:40 (2008). The nucleic acid identifiers may also be a nucleic acid barcode. A nucleic-acid based barcode is a short sequence of nucleotides (for example, DNA, RNA, or combinations thereof) that is used as an identifier for an associated molecule, such as a target molecule and/or target nucleic acid. A nucleic acid barcode can have a length of at least, for example, 4, 5, 6, 7, 8, 9, 10, 11, 12, 13, 14, 15, 16, 17, 18, 19, 20, 21, 22, 23, 24, 25, 26, 27, 28, 29, 30, 35, 40, 45, 50, 60, 70, 80, 90, or 100 nucleotides, and can be in single- or double-stranded form. One or more nucleic acid barcodes can be attached, or “tagged,” to a target molecule and/or target nucleic acid. This attachment can be direct (for example, covalent or non-covalent binding of the barcode to the target molecule) or indirect (for example, via an additional molecule, for example, a specific binding agent, such as an antibody (or other protein) or a barcode receiving adaptor (or other nucleic acid molecule). Target molecule and/or target nucleic acids can be labeled with multiple nucleic acid barcodes in combinatorial fashion, such as a nucleic acid barcode concatemer. Typically, a nucleic acid barcode is used to identify target molecules and/or target nucleic acids as being from a particular compartment (for example a discrete volume), having a particular physical property (for example, affinity, length, sequence, etc.), or having been subject to certain treatment conditions. Target molecule and/or target nucleic acid can be associated with multiple nucleic acid barcodes to provide information about all of these features (and more). Methods of generating nucleic acid-barcodes are disclosed, for example, in International Patent Application Publication No. WO/2014/047561.

[0626] In an embodiment, compositions induce a double strand break for the purpose of inducing HDR-mediated correction. In a further embodiment, two or more guide RNAs complexing with IscB polypeptide nuclease or an ortholog or homolog thereof, may be used to induce multiplexed breaks for purpose of inducing HDR-mediated correction.

[0627] A recombination template nucleic acid, as that term is used herein, refers to a nucleic acid sequence which can be used in conjunction with compositions discloser herein to alter the structure of a target position. In an embodiment, the target nucleic acid is modified to have some or all of the sequence of the recombination template nucleic acid, typically at or near cleavage site(s). In an embodiment, the recombination template nucleic acid is single stranded. In an alternate embodiment, the recombination template nucleic acid is double stranded. In an embodiment, the recombination template nucleic acid is DNA, e.g., double stranded DNA. In an alternate embodiment, the recombination template nucleic acid is single stranded DNA.

[0628] In one embodiment, a recombination template is provided to serve as a template in homologous recombination, such as within or near a target sequence nicked or cleaved by a nucleic acid-targeting effector protein as a part of a nucleic acid-targeting complex.

[0629] A recombination template may be a component of another vector as described herein, contained in a separate vector, or provided as a separate polynucleotide. A recombination template polynucleotide may be of any suitable length, such as about or more than about 10, 15, 20, 25, 50, 75, 100, 150, 200, 500, 1000, or more nucleotides in length. In one embodiment, the recombination template polynucleotide is complementary to a portion of a polynucleotide comprising the target sequence. When optimally aligned, a recombination template polynucleotide might overlap with one or more nucleotides of a target sequences (e.g. about or more than about 1, 5, 10, 15, 20, 25, 30, 35, 40, 45, 50, 60, 70, 80, 90, 100 or more nucleotides). In one embodiment, when a recombination template sequence and a polynucleotide comprising a target sequence are optimally aligned, the nearest nucleotide of the recombination template polynucleotide is within about 1, 5, 10, 15, 20, 25, 50, 75, 100, 200, 300, 400, 500, 1000, 5000, 10000, or more nucleotides from the target sequence.

[0630] In an embodiment, the recombination template nucleic acid alters the structure of the target position by participating in homologous recombination. In an embodiment, the recombination template nucleic acid alters the sequence of the target position. In an embodiment, the recombination template nucleic acid results in the incorporation of a modified, or non-naturally occurring base into the target nucleic acid.

[0631] The recombination template sequence may undergo a breakage mediated or catalyzed recombination with the target sequence. In an embodiment, the recombination template nucleic acid may include sequence that corresponds to a site on the target sequence that is cleaved by an IscB polypeptide nuclease mediated cleavage event. In an embodiment, the recombination template nucleic acid may include sequence that corresponds to both, a first site on the target sequence that is cleaved in a first IscB polypeptide nuclease mediated event and a second site on the target sequence that is cleaved in a second IscB polypeptide nuclease mediated event.

[0632] In an embodiment, the recombination template nucleic acid can include sequence which results in an alteration in the coding sequence of a translated sequence, e.g., one which results in the substitution of one amino acid for another in a protein product, e.g., transforming a mutant allele into a wild type allele, transforming a wild type allele into a mutant allele, and/or introducing a stop codon, insertion of an amino acid residue, deletion of an amino acid residue, or a nonsense mutation. In an embodiment, the recombination template nucleic acid can include sequence which results in an alteration in a non-coding sequence, e.g., an alteration in an exon or in a 5′ or 3′ non-translated or non-transcribed region. Such alterations include an alteration in a control element, e.g., a promoter, enhancer, and an alteration in a cis-acting or trans-acting control element.

[0633] A recombination template nucleic acid having homology with a target position in a target gene may be used to alter the structure of a target sequence. The recombination template sequence may be used to alter an unwanted structure, e.g., an unwanted or mutant nucleotide. The recombination template nucleic acid may include sequence which, when integrated, results in: decreasing the activity of a positive control element; increasing the activity of a positive control element; decreasing the activity of a negative control element; increasing the activity of a negative control element; decreasing the expression of a gene; increasing the expression of a gene; increasing resistance to a disorder or disease; increasing resistance to viral entry; correcting a mutation or altering an unwanted amino acid residue conferring, increasing, abolishing or decreasing a biological property of a gene product, e.g., increasing the enzymatic activity of an enzyme, or increasing the ability of a gene product to interact with another molecule.

[0634] The recombination template nucleic acid may include sequence which results in: a change in sequence of 1, 2, 3, 4, 5, 6, 7, 8, 9, 10, 1 1, 12 or more nucleotides of the target sequence. In an embodiment, the recombination template nucleic acid may be 20+/−10, 30+/−10, 40+/−10, 50+/−10, 60+/−10, 70+/−10, 80+/−10, 90+/−10, 100+/−10, 1 10+/−10, 120+/−10, 130+/−10, 140+/−10, 150+/−10, 160+/−10, 170+/−10, 1 80+/−10, 190+/−10, 200+/−10, 210+/−10, of 220+/−10 nucleotides in length. In an embodiment, the t recombination template nucleic acid may be 30+/−20, 40+/−20, 50+/−20, 60+/−20, 70+/−20, 80+/−20, 90+/−20, 100+/−20, 1 10+/−20, 120+/−20, 130+/−20, 140+/−20, I 50+/−20, 160+/−20, 170+/−20, 180+/−20, 190+/−20, 200+/−20, 210+/−20, of 220+/−20 nucleotides in length. In an embodiment, the recombination template nucleic acid is 10 to 1,000, 20 to 900, 30 to 800, 40 to 700, 50 to 600, 50 to 500, 50 to 400, 50 to 300, 50 to 200, or 50 to 100 nucleotides in length.

[0635] A recombination template nucleic acid comprises the following components: [5′ homology arm]-[replacement sequence]-[3′ homology arm]. The homology arms provide for recombination into the chromosome, thus replacing the undesired element, e.g., a mutation or signature, with the replacement sequence. In an embodiment, the homology arms flank the most distal cleavage sites. In an embodiment, the 3′ end of the 5′ homology arm is the position next to the 5′ end of the replacement sequence. In an embodiment, the 5′ homology arm can extend at least 10, 20, 30, 40, 50, 100, 200, 300, 400, 500, 600, 700, 800, 900, 1000, 1500, or 2000 nucleotides 5′ from the 5′ end of the replacement sequence. In an embodiment, the 5′ end of the 3′ homology arm is the position next to the 3′ end of the replacement sequence. In an embodiment, the 3′ homology arm can extend at least 10, 20, 30, 40, 50, 100, 200, 300, 400, 500, 600, 700, 800, 900, 1000, 1500, or 2000 nucleotides 3′ from the 3′ end of the replacement sequence.

[0636] In an embodiment, one or both homology arms may be shortened to avoid including certain sequence repeat elements. For example, a 5′ homology arm may be shortened to avoid a sequence repeat element. In other embodiments, a 3′ homology arm may be shortened to avoid a sequence repeat element. In one embodiment, both the 5′ and the 3′ homology arms may be shortened to avoid including certain sequence repeat elements.

[0637] In an embodiment, a recombination template nucleic acids for correcting a mutation may designed for use as a single-stranded oligonucleotide. When using a single-stranded oligonucleotide, 5′ and 3′ homology arms may range up to about 200 base pairs (bp) in length, e.g., at least 25, 50, 75, 100, 125, 150, 175, or 200 bp in length.

[0638] Unlike IscB polypeptide or CRISPR-associated IscB polypeptide nuclease—mediated gene knockout, which permanently eliminates expression by mutating the gene at the DNA level, IscB polypeptide nuclease knockdown allows for temporary reduction of gene expression through the use of artificial transcription factors. Mutating key residues in both DNA cleavage domains of the IscB polypeptide nuclease, results in the generation of a catalytically inactive IscB polypeptide nuclease. A catalytically inactive IscB polypeptide or CRISPR-associated IscB polypeptide nuclease complexes with a guide RNA and localizes to the DNA sequence specified by that guide RNA's targeting domain, however, it does not cleave the target DNA. Fusion of the inactive IscB polypeptide or CRISPR-associated IscB polypeptide nuclease protein to an effector domain, e.g., a transcription repression domain, enables recruitment of the effector to any DNA site specified by the guide RNA. In an embodiment, IscB polypeptide or CRISPR-associated IscB polypeptide nuclease may be fused to a transcriptional repression domain and recruited to the promoter region of a gene. Especially for gene repression, it is contemplated herein that blocking the binding site of an endogenous transcription factor would aid in downregulating gene expression. In another embodiment, an inactive IscB polypeptide or CRISPR-associated IscB polypeptide nuclease can be fused to a chromatin modifying protein. Altering chromatin status can result in decreased expression of the target gene.

[0639] In an embodiment, a guide RNA molecule can be targeted to a known transcription response elements (e.g., promoters, enhancers, etc.), a known upstream activating sequences, and/or sequences of unknown or known function that are suspected of being able to control expression of the target DNA.

[0640] In some methods, a target polynucleotide can be inactivated to affect the modification of the expression in a cell. For example, upon the binding of a composition to a target sequence in a cell, the target polynucleotide is inactivated such that the sequence is not transcribed, the coded protein is not produced, or the sequence does not function as the wild-type sequence does. For example, a protein or microRNA coding sequence may be inactivated such that the protein is not produced.

### Non-Homologous End-Joining

[0641] In an embodiment, nuclease-induced non-homologous end-joining (NHEJ) can be used to target gene-specific knockouts. Nuclease-induced NHEJ can also be used to remove (e.g., delete) sequence in a gene of interest. Generally, NHEJ repairs a double-strand break in the DNA by joining together the two ends; however, generally, the original sequence is restored only if two compatible ends, exactly as they were formed by the double-strand break, are perfectly ligated. The DNA ends of the double-strand break are frequently the subject of enzymatic processing, resulting in the addition or removal of nucleotides, at one or both strands, prior to rejoining of the ends. This results in the presence of insertion and/or deletion (indel) mutations in the DNA sequence at the site of the NHEJ repair. Two-thirds of these mutations typically alter the reading frame and, therefore, produce a non-functional protein. Additionally, mutations that maintain the reading frame, but which insert or delete a significant amount of sequence, can destroy functionality of the protein. This is locus dependent as mutations in critical functional domains are likely less tolerable than mutations in non-critical regions of the protein. The indel mutations generated by NHEJ are unpredictable in nature; however, at a given break site certain indel sequences are favored and are over-represented in the population, likely due to small regions of microhomology. The lengths of deletions can vary widely; most commonly in the 1-50 bp range, but they can easily be greater than 50 bp, e.g., they can easily reach greater than about 100-200 bp. Insertions tend to be shorter and often include short duplications of the sequence immediately surrounding the break site. However, it is possible to obtain large insertions, and in these cases, the inserted sequence has often been traced to other regions of the genome or to plasmid DNA present in the cells.

[0642] Because NHEJ is a mutagenic process, it may also be used to delete small sequence motifs as long as the generation of a specific final sequence is not required. If a double-strand break is targeted near to a short target sequence, the deletion mutations caused by the NHEJ repair often span, and therefore remove, the unwanted nucleotides. For the deletion of larger DNA segments, introducing two double-strand breaks, one on each side of the sequence, can result in NHEJ between the ends with removal of the entire intervening sequence. Both of these approaches can be used to delete specific DNA sequences; however, the error-prone nature of NHEJ may still produce indel mutations at the site of repair.

[0643] Both double strand cleaving IscB polypeptide nuclease, or an ortholog or homolog thereof, and single strand, or nickase, IscB polypeptide nuclease, or an ortholog or homolog thereof, molecules can be used in the methods and compositions described herein to generate NHEJ-mediated indels. NHEJ-mediated indels targeted to the gene, e.g., a coding region, e.g., an early coding region of a gene of interest can be used to knockout (i.e., eliminate expression of) a gene of interest. For example, early coding region of a gene of interest includes sequence immediately following a transcription start site, within a first exon of the coding sequence, or within 500 bp of the transcription start site (e.g., less than 500, 450, 400, 350, 300, 250, 200, 150, 100 or 50 bp).

[0644] In an embodiment, in which a guide RNA and IscB polypeptide nuclease, or an ortholog or homolog thereof, generate a double strand break for the purpose of inducing NHEJ-mediated indels, a guide RNA may be configured to position one double-strand break in close proximity to a nucleotide of the target position. In an embodiment, the cleavage site may be between 0-500 bp away from the target position (e.g., less than 500, 400, 300, 200, 100, 50, 40, 30, 25, 20, 15, 10, 9, 8, 7, 6, 5, 4, 3, 2 or 1 bp from the target position).

[0645] In an embodiment, in which two guide RNAs complexing with IscB polypeptide nuclease, or an ortholog or homolog thereof, e.g., IscB polypeptide nickases induce two single strand breaks for the purpose of inducing NHEJ-mediated indels, two guide RNAs may be configured to position two single-strand breaks to provide for NHEJ repair a nucleotide of the target position.

[0646] In some examples, the systems herein may introduce one or more indels via NHEJ pathway and insert sequence from a combination template via HDR.

### Exemplary Applications

[0647] The invention provides a non-naturally occurring or engineered composition, or one or more polynucleotides encoding components of said composition, or vector or delivery systems comprising one or more polynucleotides encoding components of said composition for use in a modifying a target cell in vivo, ex vivo or in vitro and, may be conducted in a manner alters the cell such that once modified the progeny or cell line of the IscB polypeptide or CRISPR-associated IscB polypeptide nuclease modified cell retains the altered phenotype. The modified cells and progeny may be part of a multi-cellular organism such as a plant or animal with ex vivo or in vivo application of composition to desired cell types. The methods herein include a therapeutic method of treatment. The therapeutic method of treatment may comprise gene or genome editing, or gene therapy.

[0648] In one embodiment, one or more vectors described herein are used to produce a non-human transgenic animal or transgenic plant. In one embodiment, the transgenic animal is a mammal, such as a mouse, rat, or rabbit. Methods for producing transgenic animals and plants are known in the art, and generally begin with a method of cell transfection, such as described herein.

### Use of Orthogonal Catalytically Inactive IscB Polypeptide or CRISPR-Associated IscB Polypeptide Nucleases

[0649] In one embodiment, the IscB polypeptide nickase is used in combination with an orthogonal catalytically inactive IscB polypeptide or CRISPR-associated IscB polypeptide nuclease to increase efficiency of said nickase (e.g., as described in Chen et al. 2017, Nature Communications 8:14958; doi:10.1038/ncomms14958). More particularly, the orthogonal catalytically inactive IscB polypeptide nuclease is characterized by a different TAM recognition site than the IscB nickase used in the AD-functionalized composition and the corresponding guide sequence is selected to bind to a target sequence proximal to that of the nickase of the functionalized IscB polypeptide or CRISPR-associated IscB polypeptide nuclease. The orthogonal catalytically inactive IscB polypeptide or CRISPR-associated IscB polypeptide nuclease as used in the context of the present invention does not form part of the functionalized composition but merely functions to increase the efficiency of said nickase and is used in combination with a standard hRNA as described in the art for said IscB polypeptide or CRISPR-associated IscB polypeptide nuclease. In one embodiment, said orthogonal catalytically inactive IscB polypeptide or CRISPR-associated IscB polypeptide nuclease is a dead IscB polypeptide nuclease, i.e. comprising one or more mutations which abolishes the nuclease activity of said IscB polypeptide nuclease. In one embodiment, the catalytically inactive orthogonal IscB polypeptide or CRISPR-associated IscB polypeptide nuclease is provided with two or more ωRNAs or guide RNAs which are capable of hybridizing to target sequences which are proximal to the target sequence of the nickase. In one embodiment, at least two ωRNAs are used to target said catalytically inactive IscB polypeptide or CRISPR-associated IscB polypeptide nuclease, of which at least one ωRNA or guide RNAs is capable of hybridizing to a target sequence 5″ of the target sequence of the nickase and at least one ωRNA is capable of hybridizing to a target sequence 3′ of the target sequence of the nickase of the functionalized composition, whereby said one or more target sequences may be on the same or the opposite DNA strand as the target sequence of the IscB polypeptide or CRISPR-associated IscB polypeptide nickase. In one embodiment, the guide sequences for the one or more hRNAs of the orthogonal catalytically inactive IscB polypeptide or CRISPR-associated IscB polypeptide nuclease are selected such that the target sequences are proximal to that of the hRNA for the targeting of the functionalized composition, e.g. for the targeting of the nickase. In one embodiment, the one or more target sequences of the orthogonal catalytically inactive IscB polypeptide or CRISPR-associated IscB polypeptide nuclease are each separated from the target sequence of the nickase by more than 5 but less than 450 basepairs. Optimal distances between the target sequences of the guides for use with the orthogonal catalytically inactive IscB polypeptide or CRISPR-associated IscB polypeptide nuclease and the target sequence of the functionalized composition can be determined by the skilled person. In one embodiment, the catalytically inactive orthogonal IscB polypeptide or CRISPR-associated IscB polypeptide nuclease has been modified to alter its TAM specificity as described elsewhere herein. In one embodiment, the IscB polypeptide or CRISPR-associated IscB polypeptide nickase is a nickase which, by itself has limited activity in human cells, but which, in combination with an inactive orthogonal IscB polypeptide or CRISPR-associated IscB polypeptide nuclease and one or more corresponding proximal guides ensures the required nickase activity.

### Detection Methods Such as FISH

[0650] In one aspect, the invention provides an engineered, non-naturally occurring composition comprising a catalytically inactivate IscB polypeptide or CRISPR-associated IscB polypeptide nuclease described herein, and use this system in detection methods such as fluorescence in situ hybridization (FISH). A dead IscB polypeptide or CRISPR-associated IscB polypeptide nuclease which lacks the ability to produce DNA double-strand breaks may be fused with a marker, such as fluorescent protein, such as the enhanced green fluorescent protein (eEGFP) and co-expressed with small guide RNAs to target pericentric, centric and teleomeric repeats in vivo. The dead IscB polypeptide or CRISPR-associated IscB polypeptide nuclease system can be used to visualize both repetitive sequences and individual genes in the human genome. Such new applications of labelled dead IscB polypeptide or CRISPR-associated IscB polypeptide nuclease may be important in imaging cells and studying the functional nuclear architecture, especially in cases with a small nucleus volume or complex 3-D structures. (Chen B, Gilbert L A, Cimini B A, Schnitzbauer J, Zhang W, Li G W, Park J, Blackburn E H, Weissman J S, Qi L S, Huang B. 2013. Dynamic imaging of genomic loci in living human cells by an optimized CRISPR/Cas system. Cell 155(7):1479-91. doi: 10.1016/j.cell.2013.12.001.)

### Patient-Specific Screening Methods

[0651] A nucleic acid-targeting system that targets DNA, e.g., trinucleotide repeats can be used to screen patients or patent samples for the presence of such repeats. The repeats can be the target of the RNA of the nucleic acid-targeting system, and if there is binding thereto by the nucleic acid-targeting system, that binding can be detected, to thereby indicate that such a repeat is present. Thus, a nucleic acid-targeting system can be used to screen patients or patient samples for the presence of the repeat. The patient can then be administered suitable compound(s) to address the condition; or, can be administered a nucleic acid-targeting system to bind to and cause insertion, deletion or mutation and alleviate the condition.

### Models of Genetic and Epigenetic Conditions

[0652] A method of the invention may be used to create a plant, an animal or cell that may be used to model and/or study genetic or epigenetic conditions of interest, such as a through a model of mutations of interest or a disease model. As used herein, “disease” refers to a disease, disorder, or indication in a subject. For example, a method of the invention may be used to create an animal or cell that comprises a modification in one or more nucleic acid sequences associated with a disease, or a plant, animal or cell in which the expression of one or more nucleic acid sequences associated with a disease are altered. Such a nucleic acid sequence may encode a disease associated protein sequence or may be a disease associated control sequence. Accordingly, it is understood that in embodiments of the invention, a plant, subject, patient, organism or cell can be a non-human subject, patient, organism or cell. Thus, the invention provides a plant, animal or cell, produced by the present methods, or a progeny thereof. The progeny may be a clone of the produced plant or animal, or may result from sexual reproduction by crossing with other individuals of the same species to introgress further desirable traits into their offspring. The cell may be in vivo or ex vivo in the cases of multicellular organisms, particularly animals or plants. In the instance where the cell is in cultured, a cell line may be established if appropriate culturing conditions are met and preferably if the cell is suitably adapted for this purpose (for instance a stem cell). Bacterial cell lines produced by the invention are also envisaged. Hence, cell lines are also envisaged.

[0653] In some methods, the disease model can be used to study the effects of mutations on the animal or cell and development and/or progression of the disease using measures commonly used in the study of the disease. Alternatively, such a disease model is useful for studying the effect of a pharmaceutically active compound on the disease.

[0654] In some methods, the disease model can be used to assess the efficacy of a potential gene therapy strategy. That is, a disease-associated gene or polynucleotide can be modified such that the disease development and/or progression is inhibited or reduced. In particular, the method comprises modifying a disease-associated gene or polynucleotide such that an altered protein is produced and, as a result, the animal or cell has an altered response. Accordingly, in some methods, a genetically modified animal may be compared with an animal predisposed to development of the disease such that the effect of the gene therapy event may be assessed.

[0655] In another embodiment, this invention provides a method of developing a biologically active agent that modulates a cell signaling event associated with a disease gene. The method comprises contacting a test compound with a cell comprising one or more vectors that drive expression of one or more of a IscB polypeptide or CRISPR-associated IscB polypeptide nuclease, and a conserved nucleotide sequence linked to a guide sequence; and detecting a change in a readout that is indicative of a reduction or an augmentation of a cell signaling event associated with, e.g., a mutation in a disease gene contained in the cell.

[0656] A cell model or animal model can be constructed in combination with the method of the invention for screening a cellular function change. Such a model may be used to study the effects of a genome sequence modified by the complex of the invention on a cellular function of interest. For example, a cellular function model may be used to study the effect of a modified genome sequence on intracellular signaling or extracellular signaling. Alternatively, a cellular function model may be used to study the effects of a modified genome sequence on sensory perception. In some such models, one or more genome sequences associated with a signaling biochemical pathway in the model are modified.

[0657] Several disease models have been specifically investigated. These include de novo autism risk genes CHD8, KATNAL2, and SCN2A; and the syndromic autism (Angelman Syndrome) gene UBE3A. These genes and resulting autism models are of course preferred, but serve to show the broad applicability of the invention across genes and corresponding models. An altered expression of one or more genome sequences associated with a signaling biochemical pathway can be determined by assaying for a difference in the mRNA levels of the corresponding genes between the test model cell and a control cell, when they are contacted with a candidate agent. Alternatively, the differential expression of the sequences associated with a signaling biochemical pathway is determined by detecting a difference in the level of the encoded polypeptide or gene product.

[0658] To assay for an agent-induced alteration in the level of mRNA transcripts or corresponding polynucleotides, nucleic acid contained in a sample is first extracted according to standard methods in the art. For instance, mRNA can be isolated using various lytic enzymes or chemical solutions according to the procedures set forth in Sambrook et al. (1989), or extracted by nucleic-acid-binding resins following the accompanying instructions provided by the manufacturers. The mRNA contained in the extracted nucleic acid sample is then detected by amplification procedures or conventional hybridization assays (e.g. Northern blot analysis) according to methods widely known in the art or based on the methods exemplified herein.

[0659] For purpose of this invention, amplification means any method employing a primer and a polymerase capable of replicating a target sequence with reasonable fidelity. Amplification may be carried out by natural or recombinant DNA polymerases such as TaqGold™, T7 DNA polymerase, Klenow fragment of E. coli DNA polymerase, and reverse transcriptase. A preferred amplification method is PCR. In particular, the isolated RNA can be subjected to a reverse transcription assay that is coupled with a quantitative polymerase chain reaction (RT-PCR) in order to quantify the expression level of a sequence associated with a signaling biochemical pathway.

[0660] Detection of the gene expression level can be conducted in real time in an amplification assay. In one aspect, the amplified products can be directly visualized with fluorescent DNA-binding agents including but not limited to DNA intercalators and DNA groove binders. Because the amount of the intercalators incorporated into the double-stranded DNA molecules is typically proportional to the amount of the amplified DNA products, one can conveniently determine the amount of the amplified products by quantifying the fluorescence of the intercalated dye using conventional optical systems in the art. DNA-binding dye suitable for this application include SYBR green, SYBR blue, DAPI, propidium iodine, Hoeste, SYBR gold, ethidium bromide, acridines, proflavine, acridine orange, acriflavine, fluorcoumanin, ellipticine, daunomycin, chloroquine, distamycin D, chromomycin, homidium, mithramycin, ruthenium polypyridyls, anthramycin, and the like.

[0661] In another aspect, other fluorescent labels such as sequence specific probes can be employed in the amplification reaction to facilitate the detection and quantification of the amplified products. Probe-based quantitative amplification relies on the sequence-specific detection of a desired amplified product. It utilizes fluorescent, target-specific probes (e.g., TaqMan® probes) resulting in increased specificity and sensitivity. Methods for performing probe-based quantitative amplification are well established in the art and are taught in U.S. Pat. No. 5,210,015.

[0662] In yet another aspect, conventional hybridization assays using hybridization probes that share sequence homology with sequences associated with a signaling biochemical pathway can be performed. Typically, probes are allowed to form stable complexes with the sequences associated with a signaling biochemical pathway contained within the biological sample derived from the test subject in a hybridization reaction. It will be appreciated by one of skill in the art that where antisense is used as the probe nucleic acid, the target polynucleotides provided in the sample are chosen to be complementary to sequences of the antisense nucleic acids. Conversely, where the nucleotide probe is a sense nucleic acid, the target polynucleotide is selected to be complementary to sequences of the sense nucleic acid.

[0663] Hybridization can be performed under conditions of various stringency. Suitable hybridization conditions for the practice of the present invention are such that the recognition interaction between the probe and sequences associated with a signaling biochemical pathway is both sufficiently specific and sufficiently stable. Conditions that increase the stringency of a hybridization reaction are widely known and published in the art. See, for example, (Sambrook, et al., (1989); Nonradioactive In Situ Hybridization Application Manual, Boehringer Mannheim, second edition). The hybridization assay can be formed using probes immobilized on any solid support, including but are not limited to nitrocellulose, glass, silicon, and a variety of gene arrays. A preferred hybridization assay is conducted on high-density gene chips as described in U.S. Pat. No. 5,445,934.

[0664] For a convenient detection of the probe-target complexes formed during the hybridization assay, the nucleotide probes are conjugated to a detectable label. Detectable labels suitable for use in the present invention include any composition detectable by photochemical, biochemical, spectroscopic, immunochemical, electrical, optical or chemical means. A wide variety of appropriate detectable labels are known in the art, which include fluorescent or chemiluminescent labels, radioactive isotope labels, enzymatic or other ligands. In preferred embodiments, one will likely desire to employ a fluorescent label or an enzyme tag, such as digoxigenin, β-galactosidase, urease, alkaline phosphatase or peroxidase, avidin/biotin complex.

[0665] The detection methods used to detect or quantify the hybridization intensity will typically depend upon the label selected above. For example, radiolabels may be detected using photographic film or a phosphoimager. Fluorescent markers may be detected and quantified using a photodetector to detect emitted light. Enzymatic labels are typically detected by providing the enzyme with a substrate and measuring the reaction product produced by the action of the enzyme on the substrate; and finally colorimetric labels are detected by simply visualizing the colored label.

[0666] An agent-induced change in expression of sequences associated with a signaling biochemical pathway can also be determined by examining the corresponding gene products. Determining the protein level typically involves a) contacting the protein contained in a biological sample with an agent that specifically bind to a protein associated with a signaling biochemical pathway; and (b) identifying any agent:protein complex so formed. In one aspect of this embodiment, the agent that specifically binds a protein associated with a signaling biochemical pathway is an antibody, preferably a monoclonal antibody.

[0667] The reaction is performed by contacting the agent with a sample of the proteins associated with a signaling biochemical pathway derived from the test samples under conditions that will allow a complex to form between the agent and the proteins associated with a signaling biochemical pathway. The formation of the complex can be detected directly or indirectly according to standard procedures in the art. In the direct detection method, the agents are supplied with a detectable label and unreacted agents may be removed from the complex; the amount of remaining label thereby indicating the amount of complex formed. For such method, it is preferable to select labels that remain attached to the agents even during stringent washing conditions. It is preferable that the label does not interfere with the binding reaction. In the alternative, an indirect detection procedure may use an agent that contains a label introduced either chemically or enzymatically. A desirable label generally does not interfere with binding or the stability of the resulting agent:polypeptide complex. However, the label is typically designed to be accessible to an antibody for an effective binding and, hence generating a detectable signal.

[0668] A wide variety of labels suitable for detecting protein levels are known in the art. Non-limiting examples include radioisotopes, enzymes, colloidal metals, fluorescent compounds, bioluminescent compounds, and chemiluminescent compounds.

[0669] The amount of agent:polypeptide complexes formed during the binding reaction can be quantified by standard quantitative assays. As illustrated above, the formation of agent:polypeptide complex can be measured directly by the amount of label remained at the site of binding. In an alternative, the protein associated with a signaling biochemical pathway is tested for its ability to compete with a labeled analog for binding sites on the specific agent. In this competitive assay, the amount of label captured is inversely proportional to the amount of protein sequences associated with a signaling biochemical pathway present in a test sample.

[0670] A number of techniques for protein analysis based on the general principles outlined above are available in the art. They include but are not limited to radioimmunoassay, ELISA (enzyme linked immunoradiometric assays), “sandwich” immunoassays, immunoradiometric assays, in situ immunoassays (using e.g., colloidal gold, enzyme or radioisotope labels), western blot analysis, immunoprecipitation assays, immunofluorescent assays, and SDS-PAGE.

[0671] Antibodies that specifically recognize or bind to proteins associated with a signaling biochemical pathway are preferable for conducting the aforementioned protein analyses. Where desired, antibodies that recognize a specific type of post-translational modifications (e.g., signaling biochemical pathway inducible modifications) can be used. Post-translational modifications include but are not limited to glycosylation, lipidation, acetylation, and phosphorylation. These antibodies may be purchased from commercial vendors. For example, anti-phosphotyrosine antibodies that specifically recognize tyrosine-phosphorylated proteins are available from a number of vendors including Invitrogen and Perkin Elmer. Anti-phosphotyrosine antibodies are particularly useful in detecting proteins that are differentially phosphorylated on their tyrosine residues in response to an ER stress. Such proteins include but are not limited to eukaryotic translation initiation factor 2 alpha (eIF-2α). Alternatively, these antibodies can be generated using conventional polyclonal or monoclonal antibody technologies by immunizing a host animal or an antibody-producing cell with a target protein that exhibits the desired post-translational modification.

### Genome Wide Knock-out Screening

[0672] The IscB polypeptide nuclease and systems described herein can be used to perform efficient and cost effective functional genomic screens. Such screens can utilize IscB polypeptide nuclease-based genome wide libraries. Such screens and libraries can provide for determining the function of genes, cellular pathways genes are involved in, and how any alteration in gene expression can result in a particular biological process. An advantage of the present invention is that the composition avoids off-target binding and its resulting side effects. This is achieved using systems arranged to have a high degree of sequence specificity for the target DNA. In preferred embodiments of the invention, the IscB polypeptide or CRISPR-associated IscB polypeptide nuclease complexes are IscB polypeptide nuclease complexes.

[0673] In embodiments of the invention, a genome wide library may comprise a plurality of IscB polypeptide nuclease guide RNAs, as described herein, comprising guide sequences that are capable of targeting a plurality of target sequences in a plurality of genomic loci in a population of eukaryotic cells. The population of cells may be a population of embryonic stem (ES) cells. The target sequence in the genomic locus may be a non-coding sequence. The non-coding sequence may be an intron, regulatory sequence, splice site, 3′ UTR, 5′ UTR, or polyadenylation signal. Gene function of one or more gene products may be altered by said targeting. The targeting may result in a knockout of gene function. The targeting of a gene product may comprise more than one guide RNA. A gene product may be targeted by 2, 3, 4, 5, 6, 7, 8, 9, or 10 guide RNAs, preferably 3 to 4 per gene. Off-target modifications may be minimized by exploiting the staggered double strand breaks generated by IscB polypeptide nuclease complexes or by utilizing methods analogous to those used in composition (See, e.g., DNA targeting specificity of RNA-guided Cas nucleases. Hsu, P., Scott, D., Weinstein, J., Ran, FA., Konermann, S., Agarwala, V., Li, Y., Fine, E., Wu, X., Shalem, O., Cradick, T J., Marraffini, LA., Bao, G., & Zhang, F. Nat Biotechnol doi:10.1038/nbt.2647 (2013)), incorporated herein by reference. The targeting may be of about 100 or more sequences. The targeting may be of about 1000 or more sequences. The targeting may be of about 20,000 or more sequences. The targeting may be of the entire genome. The targeting may be of a panel of target sequences focused on a relevant or desirable pathway. The pathway may be an immune pathway. The pathway may be a cell division pathway.

[0674] One aspect of the invention comprehends a genome wide library that may comprise a plurality of ωRNAs or guide RNAs that may comprise guide sequences that are capable of targeting a plurality of target sequences in a plurality of genomic loci, wherein said targeting results in a knockout of gene function. This library may potentially comprise oguide RNAs that target each and every gene in the genome of an organism.

[0675] In one embodiment of the invention, the organism or subject is a eukaryote (including mammal including human) or a non-human eukaryote or a non-human animal or a non-human mammal. In one embodiment, the organism or subject is a non-human animal, and may be an arthropod, for example, an insect, or may be a nematode. In some methods of the invention the organism or subject is a plant. In some methods of the invention, the organism or subject is a mammal or a non-human mammal. A non-human mammal may be for example a rodent (preferably a mouse or a rat), an ungulate, or a primate. In some methods of the invention the organism or subject is algae, including microalgae, or is a fungus.

[0676] The knockout of gene function may comprise introducing into each cell in the population of cells a vector system of one or more vectors comprising an engineered, non-naturally occurring composition herein. The guide sequence may target a unique gene in each cell, wherein the IscB polypeptide or CRISPR-associated IscB polypeptide nuclease is operably linked to a regulatory element, wherein when transcribed, the ωRNAs or guide RNA comprising the guide sequence directs sequence-specific binding of the IscB polypeptide nuclease to a target sequence in the genomic loci of the unique gene, inducing cleavage of the genomic loci by the IscB polypeptide or CRISPR-associated IscB polypeptide nuclease, and confirming different knockout mutations in a plurality of unique genes in each cell of the population of cells thereby generating a gene knockout cell library. The invention comprehends that the population of cells is a population of eukaryotic cells, and in a preferred embodiment, the population of cells is a population of embryonic stem (ES) cells.

[0677] The one or more vectors may be plasmid vectors. The vector may be a single vector comprising a IscB polypeptide or CRISPR-associated IscB polypeptide nuclease, a ωRNA, and optionally, a selection marker into target cells. Not being bound by a theory, the ability to simultaneously deliver a IscB polypeptide or CRISPR-associated IscB polypeptide nuclease and hRNA through a single vector enables application to any cell type of interest, without the need to first generate cell lines that express the IscB polypeptide or CRISPR-associated IscB polypeptide nuclease. The regulatory element may be an inducible promoter. The inducible promoter may be a doxycycline inducible promoter. In some methods of the invention the expression of the guide sequence is under the control of the T7 promoter and is driven by the expression of T7 polymerase. The confirming of different knockout mutations may be by whole exome sequencing. The knockout mutation may be achieved in 100 or more unique genes. The knockout mutation may be achieved in 1000 or more unique genes. The knockout mutation may be achieved in 20,000 or more unique genes. The knockout mutation may be achieved in the entire genome. The knockout of gene function may be achieved in a plurality of unique genes which function in a particular physiological pathway or condition. The pathway or condition may be an immune pathway or condition. The pathway or condition may be a cell division pathway or condition.

[0678] Useful in the practice of the instant invention utilizing IscB polypeptide or CRISPR-associated IscB polypeptide nuclease complexes are methods used in compositions and reference is made to: Genome-Scale CRISPR-Cas Knockout Screening in Human Cells. Shalem, O., Sanjana, N E., Hartenian, E., Shi, X., Scott, D A., Mikkelson, T., Heckl, D., Ebert, B L., Root, D E., Doench, J G., Zhang, F. Science December 12. (2013). [Epub ahead of print]; Published in final edited form as: Science. 2014 Jan. 3; 343(6166): 84-87. Shalem et al. involves a new way to interrogate gene function on a genome-wide scale. Their studies showed that delivery of a genome-scale CRISPR-Cas knockout (GeCKO) library targeted 18,080 genes with 64,751 unique guide sequences enabled both negative and positive selection screening in human cells. First, the authors showed use of the GeCKO library to identify genes essential for cell viability in cancer and pluripotent stem cells. Next, in a melanoma model, the authors screened for genes whose loss is involved in resistance to vemurafenib, a therapeutic that inhibits mutant protein kinase BRAF. Their studies showed that the highest-ranking candidates included previously validated genes NF1 and MED12 as well as novel hitsNF2, CUL3, TADA2B, and TADA1. The authors observed a high level of consistency between independent guide RNAs targeting the same gene and a high rate of hit confirmation, and thus demonstrated the promise of genome-scale screening with IscB polypeptide nuclease.

[0679] Reference is also made to US patent publication number US20140357530; and PCT Patent Publication WO2014093701, hereby incorporated herein by reference. Reference is also made to NIH Press Release of Oct. 22, 2015 entitled, “Researchers identify potential alternative to CRISPR-Cas genome editing tools: New Cas enzymes shed light on evolution of CRISPR-Cas systems, which is incorporated by reference.

### Functional Alteration and Screening

[0680] In another aspect, the present invention provides for a method of functional evaluation and screening of genes. The use of the compositions to precisely deliver functional domains, to activate or repress genes or to alter epigenetic state by precisely altering the methylation site on a specific locus of interest, can be with one or more ωRNAs or guide RNAs applied to a single cell or population of cells or with a library applied to genome in a pool of cells ex vivo or in vivo comprising the administration or expression of a library comprising a plurality of hRNAs (comprising guide molecules) and wherein the screening further comprises use of a IscB polypeptide or CRISPR-associated IscB polypeptide nuclease, wherein the complex comprising the IscB polypeptide or CRISPR-associated IscB polypeptide nuclease is modified to comprise a heterologous functional domain. In an aspect the invention provides a method for screening a genome comprising the administration to a host or expression in a host in vivo of a library. In an aspect the invention provides a method as herein discussed further comprising an activator administered to the host or expressed in the host. In an aspect the invention provides a method as herein discussed wherein the activator is attached to a IscB polypeptide or CRISPR-associated IscB polypeptide nuclease. In an aspect the invention provides a method as herein discussed wherein the activator is attached to the N terminus or the C terminus of the IscB polypeptide or CRISPR-associated IscB polypeptide nuclease. In an aspect the invention provides a method as herein discussed wherein the activator is attached to a ωRNA loop. In an aspect the invention provides a method as herein discussed further comprising a repressor administered to the host or expressed in the host. In an aspect the invention provides a method as herein discussed, wherein the screening comprises affecting and detecting gene activation, gene inhibition, or cleavage in the locus.

[0681] It is also preferred to target endogenous (regulatory) control elements (such as enhancers and silencers) e.g. in addition to a promoter or promoter-proximal elements. Thus, the invention can also be used to target endogenous control elements (including enhancers and silencers) in addition to targeting of the promoter. These control elements can be located upstream and downstream of the transcriptional start site (TSS), starting from 200 bp from the TSS to 100 kb away. Targeting of known control elements can be used to activate or repress the gene of interest. In some cases, a single control element can influence the transcription of multiple target genes. Targeting of a single control element could therefore be used to control the transcription of multiple genes simultaneously.

[0682] Targeting of putative control elements on the other hand (e.g. by tiling the region of the putative control element as well as 200 bp up to 100 kB around the element) can be used as a means to verify such elements (by measuring the transcription of the gene of interest) or to detect novel control elements (e.g. by tiling 100 kb upstream and downstream of the TSS of the gene of interest). In addition, targeting of putative control elements can be useful in the context of understanding genetic causes of disease. Many mutations and common SNP variants associated with disease phenotypes are located outside coding regions. Targeting of such regions with either the activation or repression systems described herein can be followed by readout of transcription of either a) a set of putative targets (e.g. a set of genes located in closest proximity to the control element) or b) whole-transcriptome readout by e.g. RNAseq or microarray. This would allow for the identification of likely candidate genes involved in the disease phenotype. Such candidate genes could be useful as novel drug targets.

[0683] Histone acetyltransferase (HAT) inhibitors are mentioned herein. However, an alternative In one embodiment is for the one or more functional domains to comprise an acetyltransferase, preferably a histone acetyltransferase. These are useful in the field of epigenomics, for example in methods of interrogating the epigenome. Methods of interrogating the epigenome may include, for example, targeting epigenomic sequences. Targeting epigenomic sequences may include the guide being directed to an epigenomic target sequence. Epigenomic target sequence may include, In one embodiment, include a promoter, silencer or an enhancer sequence.

### Saturating Mutagenesis

[0684] The compositions herein can be used to perform saturating or deep scanning mutagenesis of genomic loci in conjunction with a cellular phenotype—for instance, for determining critical minimal features and discrete vulnerabilities of functional elements required for gene expression, drug resistance, and reversal of disease. By saturating or deep scanning mutagenesis is meant that every or essentially every DNA base is cut within the genomic loci. A library of Cas1 effector protein guide RNAs may be introduced into a population of cells. The library may be introduced, such that each cell receives a single hRNA. In the case where the library is introduced by transduction of a viral vector, as described herein, a low multiplicity of infection (MOI) is used. The library may include ωRNAs targeting every sequence upstream of a TAM sequence in a genomic locus. The library may include at least 100 non-overlapping genomic sequences upstream of a TAM sequence for every 1000 base pairs within the genomic locus. The library may include hRNAs targeting sequences upstream of at least one different TAM sequence. The composition may include more than one IscB polypeptide nuclease. Any IscB polypeptide or CRISPR-associated IscB polypeptide nuclease protein as described herein, including orthologues or engineered IscB polypeptide or CRISPR-associated IscB polypeptide nuclease that recognize different TAM sequences may be used. The frequency of off target sites for a ωRNA may be less than 500. Off target scores may be generated to select ωRNAs with the lowest off target sites. Any phenotype determined to be associated with cutting at a hRNA target site may be confirmed by using ωRNAs targeting the same site in a single experiment. Validation of a target site may also be performed by using a modified IscB polypeptide or CRISPR-associated IscB polypeptide or CRISPR-associated IscB polypeptide nuclease, as described herein, and two hRNAs targeting the genomic site of interest. Not being bound by a theory, a target site is a true hit if the change in phenotype is observed in validation experiments.

[0685] The genomic loci may include at least one continuous genomic region. The at least one continuous genomic region may comprise up to the entire genome. The at least one continuous genomic region may comprise a functional element of the genome. The functional element may be within a non-coding region, coding gene, intronic region, promoter, or enhancer. The at least one continuous genomic region may comprise at least 1 kb, preferably at least 50 kb of genomic DNA. The at least one continuous genomic region may comprise a transcription factor binding site. The at least one continuous genomic region may comprise a region of DNase I hypersensitivity. The at least one continuous genomic region may comprise a transcription enhancer or repressor element. The at least one continuous genomic region may comprise a site enriched for an epigenetic signature. The at least one continuous genomic DNA region may comprise an epigenetic insulator. The at least one continuous genomic region may comprise two or more continuous genomic regions that physically interact. Genomic regions that interact may be determined by ‘4C technology’. 4C technology allows the screening of the entire genome in an unbiased manner for DNA segments that physically interact with a DNA fragment of choice, as is described in Zhao et al. ((2006) Nat Genet 38, 1341-7) and in U.S. Pat. No. 8,642,295, both incorporated herein by reference in its entirety. The epigenetic signature may be histone acetylation, histone methylation, histone ubiquitination, histone phosphorylation, DNA methylation, or a lack thereof.

[0686] The compositions for saturating or deep scanning mutagenesis can be used in a population of cells. The compositions can be used in eukaryotic cells, including but not limited to mammalian and plant cells. The population of cells may be prokaryotic cells. The population of eukaryotic cells may be a population of embryonic stem (ES) cells, neuronal cells, epithelial cells, immune cells, endocrine cells, muscle cells, erythrocytes, lymphocytes, plant cells, or yeast cells.

[0687] In one aspect, the present invention provides for a method of screening for functional elements associated with a change in a phenotype. The library may be introduced into a population of cells that are adapted to contain a IscB polypeptide or CRISPR-associated IscB polypeptide nuclease. The cells may be sorted into at least two groups based on the phenotype. The phenotype may be expression of a gene, cell growth, or cell viability. The relative representation of the ωRNAs or guide RNAs present in each group are determined, whereby genomic sites associated with the change in phenotype are determined by the representation of ωRNAs or guide RNAs present in each group. The change in phenotype may be a change in expression of a gene of interest. The gene of interest may be upregulated, downregulated, or knocked out. The cells may be sorted into a high expression group and a low expression group. The population of cells may include a reporter construct that is used to determine the phenotype. The reporter construct may include a detectable marker. Cells may be sorted by use of the detectable marker.

[0688] In another aspect, the present invention provides for a method of screening for genomic sites associated with resistance to a chemical compound. The chemical compound may be a drug or pesticide. The library may be introduced into a population of cells that are adapted to contain a IscB polypeptide or CRISPR-associated IscB polypeptide nuclease, wherein each cell of the population contains no more than one ωRNA or guide RNA; the population of cells are treated with the chemical compound; and the representation of ωRNA or guide RNAs are determined after treatment with the chemical compound at a later time point as compared to an early time point, whereby genomic sites associated with resistance to the chemical compound are determined by enrichment of ωRNAs. Representation of ωRNAs may be determined by deep sequencing methods.

[0689] Useful in the practice of the instant invention utilizing compositions are methods used in compositions and reference is made to the article entitled BCL11A enhancer dissection by Cas-mediated in situ saturating mutagenesis. Canver, M. C., Smith, E. C., Sher, F., Pinello, L., Sanjana, N. E., Shalem, O., Chen, D. D., Schupp, P. G., Vinjamur, D. S., Garcia, S. P., Luc, S., Kurita, R., Nakamura, Y., Fujiwara, Y., Maeda, T., Yuan, G., Zhang, F., Orkin, S. H., & Bauer, D. E. DOI:10.1038/naturel5521, published online Sep. 16, 2015, the article is herein incorporated by reference and discussed briefly below:

[0690] Canver et al. involves novel pooled guide RNA libraries to perform in situ saturating mutagenesis of the human and mouse BCL11A erythroid enhancers previously identified as an enhancer associated with fetal hemoglobin (HbF) level and whose mouse ortholog is necessary for erythroid BCL11A expression. This approach revealed critical minimal features and discrete vulnerabilities of these enhancers. Through editing of primary human progenitors and mouse transgenesis, the authors validated the BCL11A erythroid enhancer as a target for HbF reinduction. The authors generated a detailed enhancer map that informs therapeutic genome editing.

### Modification of a Cell or Organism

[0691] The present disclosure further provides cells comprising one or more components of the systems herein, e.g., the IscB polypeptide or CRISPR-associated IscB polypeptide nuclease and/or ωRNA(s). Also provided include cells modified by the systems and methods herein, and cell cultures, tissues, organs, organism comprising such cells or progeny thereof. The invention In one embodiment comprehends a method of modifying a cell or organism. The cell may be a prokaryotic cell or a eukaryotic cell. The cell may be a mammalian cell. The mammalian cell many be a non-human primate, bovine, porcine, rodent or mouse cell. The cell may be a non-mammalian eukaryotic cell such as poultry, fish or shrimp. The cell may also be a plant cell. The plant cell may be of a crop plant such as cassava, corn, sorghum, wheat, or rice. The plant cell may also be of an algae, tree or vegetable. The modification introduced to the cell by the present invention may be such that the cell and progeny of the cell are altered for improved production of biologic products such as an antibody, starch, alcohol or other desired cellular output. The modification introduced to the cell by the present invention may be such that the cell and progeny of the cell include an alteration that changes the biologic product produced.

### Therapeutic Uses and Methods of Treatment

[0692] Also provided herein are methods of diagnosing, prognosing, treating, and/or preventing a disease, state, or condition in or of a subject. Generally, the methods of diagnosing, prognosing, treating, and/or preventing a disease, state, or condition in or of a subject can include modifying a polynucleotide in a subject or cell thereof using a composition, system, or component thereof described herein and/or include detecting a diseased or healthy polynucleotide in a subject or cell thereof using a composition, system, or component thereof described herein. In one embodiment, the method of treatment or prevention can include using a composition, system, or component thereof to modify a polynucleotide of an infectious organism (e.g. bacterial or virus) within a subject or cell thereof. In one embodiment, the method of treatment or prevention can include using a composition, system, or component thereof to modify a polynucleotide of an infectious organism or symbiotic organism within a subject. The composition, system, and components thereof can be used to develop models of diseases, states, or conditions. The composition, system, and components thereof can be used to detect a disease state or correction thereof, such as by a method of treatment or prevention described herein. The composition, system, and components thereof can be used to screen and select cells that can be used, for example, as treatments or preventions described herein. The composition, system, and components thereof can be used to develop biologically active agents that can be used to modify one or more biologic functions or activities in a subject or a cell thereof.

[0693] In general, the method can include delivering a composition, system, and/or component thereof to a subject or cell thereof, or to an infectious or symbiotic organism by a suitable delivery technique and/or composition. Once administered the components can operate as described elsewhere herein to elicit a nucleic acid modification event. In some aspects, the nucleic acid modification event can occur at the genomic, epigenomic, and/or transcriptomic level. DNA and/or RNA cleavage, gene activation, and/or gene deactivation can occur. Additional features, uses, and advantages are described in greater detail below. On the basis of this concept, several variations are appropriate to elicit a genomic locus event, including DNA cleavage, gene activation, or gene deactivation. Using the provided compositions, the person skilled in the art can advantageously and specifically target single or multiple loci with the same or different functional domains to elicit one or more genomic locus events. In addition to treating and/or preventing a disease in a subject, the compositions may be applied in a wide variety of methods for screening in libraries in cells and functional modeling in vivo (e.g. gene activation of lincRNA and identification of function; gain-of-function modeling; loss-of-function modeling; the use the compositions of the invention to establish cell lines and transgenic animals for optimization and screening purposes).

[0694] The composition, system, and components thereof described elsewhere herein can be used to treat and/or prevent a disease, such as a genetic and/or epigenetic disease, in a subject. The composition, system, and components thereof described elsewhere herein can be used to treat and/or prevent genetic infectious diseases in a subject, such as bacterial infections, viral infections, fungal infections, parasite infections, and combinations thereof. The composition, system, and components thereof described elsewhere herein can be used to modify the composition or profile of a microbiome in a subject, which can in turn modify the health status of the subject. The composition, system, described herein can be used to modify cells ex vivo, which can then be administered to the subject whereby the modified cells can treat or prevent a disease or symptom thereof. This is also referred to in some contexts as adoptive therapy. The composition, system, described herein can be used to treat mitochondrial diseases, where the mitochondrial disease etiology involves a mutation in the mitochondrial DNA.

[0695] Also provided is a method of treating a subject, e.g., a subject in need thereof, comprising inducing gene editing by transforming the subject with the polynucleotide encoding one or more components of the composition, system, or complex or any of polynucleotides or vectors described herein and administering them to the subject. A suitable repair template may also be provided, for example delivered by a vector comprising said repair template. The repair template may be a recombination template herein. Also provided is a method of treating a subject, e.g., a subject in need thereof, comprising inducing transcriptional activation or repression of multiple target gene loci by transforming the subject with the polynucleotides or vectors described herein, wherein said polynucleotide or vector encodes or comprises one or more components of composition, system, complex or component thereof comprising multiple IscB polypeptide nucleases. Where any treatment is occurring ex vivo, for example in a cell culture, then it will be appreciated that the term ‘subject’ may be replaced by the phrase “cell or cell culture.”

[0696] Also provided is a method of treating a subject, e.g., a subject in need thereof, comprising inducing gene editing by transforming the subject with the IscB polypeptide or CRISPR-associated IscB polypeptide nuclease(s), advantageously encoding and expressing in vivo the remaining portions of the composition, system, (e.g., RNA, guides). A suitable repair template may also be provided, for example delivered by a vector comprising said repair template. Also provided is a method of treating a subject, e.g., a subject in need thereof, comprising inducing transcriptional activation or repression by transforming the subject with the IscB polypeptide nuclease(s) advantageously encoding and expressing in vivo the remaining portions of the composition, system, (e.g., RNA, guides); advantageously In one embodiment the IscB polypeptide or CRISPR-associated IscB polypeptide nuclease is a catalytically inactive IscB polypeptide or CRISPR-associated IscB polypeptide nuclease and includes one or more associated functional domains. Where any treatment is occurring ex vivo, for example in a cell culture, then it will be appreciated that the term ‘subject’ may be replaced by the phrase “cell or cell culture.”

[0697] One or more components of the composition and system described herein can be included in a composition, such as a pharmaceutical composition, and administered to a host individually or collectively. Alternatively, these components may be provided in a single composition for administration to a host. Administration to a host may be performed via viral vectors known to the skilled person or described herein for delivery to a host (e.g. lentiviral vector, adenoviral vector, AAV vector). As explained herein, use of different selection markers (e.g. for lentiviral hRNA selection) and concentration of ωRNA (e.g. dependent on whether multiple ωRNAs are used) may be advantageous for eliciting an improved effect.

[0698] Thus, also described herein are methods of inducing one or more polynucleotide modifications in a eukaryotic or prokaryotic cell or component thereof (e.g., a mitochondria) of a subject, infectious organism, and/or organism of the microbiome of the subject. The modification can include the introduction, deletion, or substitution of one or more nucleotides at a target sequence of a polynucleotide of one or more cell(s). The modification can occur in vitro, ex vivo, in situ, or in vivo.

[0699] In one embodiment, the method of treating or inhibiting a condition or a disease caused by one or more mutations in a genomic locus in a eukaryotic organism or a non-human organism can include manipulation of a target sequence within a coding, non-coding or regulatory element of said genomic locus in a target sequence in a subject or a non-human subject in need thereof comprising modifying the subject or a non-human subject by manipulation of the target sequence and wherein the condition or disease is susceptible to treatment or inhibition by manipulation of the target sequence including providing treatment comprising delivering a composition comprising the particle delivery system or the delivery system or the virus particle of any one of the above embodiment or the cell of any one of the above embodiment.

[0700] Also provided herein is the use of the particle delivery system or the delivery system or the virus particle of any one of the above embodiments or the cell of any one of the above embodiment in ex vivo or in vivo gene or genome editing; or for use in in vitro, ex vivo or in vivo gene therapy. Also provided herein are particle delivery systems, non-viral delivery systems, and/or the virus particle of any one of the above embodiments or the cell of any one of the above embodiments used in the manufacture of a medicament for in vitro, ex vivo or in vivo gene or genome editing or for use in in vitro, ex vivo or in vivo gene therapy or for use in a method of modifying an organism or a non-human organism by manipulation of a target sequence in a genomic locus associated with a disease or in a method of treating or inhibiting a condition or disease caused by one or more mutations in a genomic locus in a eukaryotic organism or a non-human organism.

[0701] In one embodiment, polynucleotide modification can include the introduction, deletion, or substitution of 1-75 nucleotides at each target sequence of said polynucleotide of said cell(s). The modification can include the introduction, deletion, or substitution of at least 1, 5, 10, 11, 12, 13, 14, 15, 16, 17, 18, 19, 20, 21, 22, 23, 24, 25, 26, 27, 28, 29, 30, 35, 40, 45, 50, or 75 nucleotides at each target sequence. The modification can include the introduction, deletion, or substitution of at least 5, 10, 11, 12, 13, 14, 15, 16, 17, 18, 19, 20, 21, 22, 23, 24, 25, 26, 27, 28, 29, 30, 35, 40, 45, 50, or 75 nucleotides at each target sequence of said cell(s). The modification can include the introduction, deletion, or substitution of at least 10, 11, 12, 13, 14, 15, 16, 17, 18, 19, 20, 21, 22, 23, 24, 25, 26, 27, 28, 29, 30, 35, 40, 45, 50, or 75 nucleotides at each target sequence of said cell(s). The modification can include the introduction, deletion, or substitution of at least 20, 21, 22, 23, 24, 25, 26, 27, 28, 29, 30, 35, 40, 45, 50, or 75 nucleotides at each target sequence of said cell(s). The modification can include the introduction, deletion, or substitution of at least 40, 45, 50, 75, 100, 200, 300, 400 or 500 nucleotides at each target sequence of said cell(s). The modification can include the introduction, deletion, or substitution of at least 500, 600, 700, 800, 900, 1000, 1100, 1200, 1300, 1400, 1500, 1600, 1700, 1800, 1900, 2000, 2100, 2200, 2300, 2400, 2500, 2600, 2700, 2800, 2900, 3000, 3100, 3200, 3300, 3400, 3500, 3600, 3700, 3800, 3900, 4000, 4100, 4200, 4300, 4400, 4500, 4600, 4700, 4800, 4900, 5000, 5100, 5200, 5300, 5400, 5500, 5600, 5700, 5800, 5900, 6000, 6100, 6200, 6300, 6400, 6500, 6600, 6700, 6800, 6900, 7000, 7100, 7200, 7300, 7400, 7500, 7600, 7700, 7800, 7900, 8000, 8100, 8200, 8300, 8400, 8500, 8600, 8700, 8800, 8900, 9000, 9100, 9200, 9300, 9400, 9500, 9600, 9700, 9800, or 9900 to 10000 nucleotides at each target sequence of said cell(s).

[0702] In one embodiment, the modifications can include the introduction, deletion, or substitution of nucleotides at each target sequence of said cell(s) via nucleic acid components (e.g., guide(s) RNA(s) or ωRNA(s)), such as those mediated by a composition, system, or a component thereof described elsewhere herein. In one embodiment, the modifications can include the introduction, deletion, or substitution of nucleotides at a target or random sequence of said cell(s) via a composition, system, or technique.

[0703] In one embodiment, the composition, system, or component thereof can promote Non-Homologous End-Joining (NHEJ). In one embodiment, modification of a polynucleotide by a composition, system, or a component thereof, such as a diseased polynucleotide, can include NHEJ. In one embodiment, promotion of this repair pathway by the composition, system, or a component thereof can be used to target gene or polynucleotide specific knock-outs and/or knock-ins. In one embodiment, promotion of this repair pathway by the composition, system, or a component thereof can be used to generate NHEJ-mediated indels. Nuclease-induced NHEJ can also be used to remove (e.g., delete) sequence in a gene of interest. Generally, NHEJ repairs a double-strand break in the DNA by joining together the two ends; however, generally, the original sequence is restored only if two compatible ends, exactly as they were formed by the double-strand break, are perfectly ligated. The DNA ends of the double-strand break are frequently the subject of enzymatic processing, resulting in the addition or removal of nucleotides, at one or both strands, prior to rejoining of the ends. This results in the presence of insertion and/or deletion (indel) mutations in the DNA sequence at the site of the NHEJ repair. The indel can range in size from 1-50 or more base pairs. In one embodiment thee indel can be 1, 2, 3, 4, 5, 6, 7, 8, 9, 10, 11, 12, 13, 14, 15, 16, 17, 18, 19, 20, 21, 22, 23, 24, 25, 26, 27, 28, 29, 30, 31, 32, 33, 34, 35, 36, 37, 38, 39, 40, 41, 42, 43, 44, 45, 46, 47, 48, 49, 50, 51, 52, 53, 54, 55, 56, 57, 58, 59, 60, 61, 62, 63, 64, 65, 66, 67, 68, 69, 70, 71, 72, 73, 74, 75, 76, 77, 78, 79, 80, 81, 82, 83, 84, 85, 86, 87, 88, 89, 90, 91, 92, 93, 94, 95, 96, 97, 98, 99, 100, 101, 102, 103, 104, 105, 106, 107, 108, 109, 110, 111, 112, 113, 114, 115, 116, 117, 118, 119, 120, 121, 122, 123, 124, 125, 126, 127, 128, 129, 130, 131, 132, 133, 134, 135, 136, 137, 138, 139, 140, 141, 142, 143, 144, 145, 146, 147, 148, 149, 150, 151, 152, 153, 154, 155, 156, 157, 158, 159, 160, 161, 162, 163, 164, 165, 166, 167, 168, 169, 170, 171, 172, 173, 174, 175, 176, 177, 178, 179, 180, 181, 182, 183, 184, 185, 186, 187, 188, 189, 190, 191, 192, 193, 194, 195, 196, 197, 198, 199, 200, 201, 202, 203, 204, 205, 206, 207, 208, 209, 210, 211, 212, 213, 214, 215, 216, 217, 218, 219, 220, 221, 222, 223, 224, 225, 226, 227, 228, 229, 230, 231, 232, 233, 234, 235, 236, 237, 238, 239, 240, 241, 242, 243, 244, 245, 246, 247, 248, 249, 250, 251, 252, 253, 254, 255, 256, 257, 258, 259, 260, 261, 262, 263, 264, 265, 266, 267, 268, 269, 270, 271, 272, 273, 274, 275, 276, 277, 278, 279, 280, 281, 282, 283, 284, 285, 286, 287, 288, 289, 290, 291, 292, 293, 294, 295, 296, 297, 298, 299, 300, 301, 302, 303, 304, 305, 306, 307, 308, 309, 310, 311, 312, 313, 314, 315, 316, 317, 318, 319, 320, 321, 322, 323, 324, 325, 326, 327, 328, 329, 330, 331, 332, 333, 334, 335, 336, 337, 338, 339, 340, 341, 342, 343, 344, 345, 346, 347, 348, 349, 350, 351, 352, 353, 354, 355, 356, 357, 358, 359, 360, 361, 362, 363, 364, 365, 366, 367, 368, 369, 370, 371, 372, 373, 374, 375, 376, 377, 378, 379, 380, 381, 382, 383, 384, 385, 386, 387, 388, 389, 390, 391, 392, 393, 394, 395, 396, 397, 398, 399, 400, 401, 402, 403, 404, 405, 406, 407, 408, 409, 410, 411, 412, 413, 414, 415, 416, 417, 418, 419, 420, 421, 422, 423, 424, 425, 426, 427, 428, 429, 430, 431, 432, 433, 434, 435, 436, 437, 438, 439, 440, 441, 442, 443, 444, 445, 446, 447, 448, 449, 450, 451, 452, 453, 454, 455, 456, 457, 458, 459, 460, 461, 462, 463, 464, 465, 466, 467, 468, 469, 470, 471, 472, 473, 474, 475, 476, 477, 478, 479, 480, 481, 482, 483, 484, 485, 486, 487, 488, 489, 490, 491, 492, 493, 494, 495, 496, 497, 498, 499, or 500 base pairs or more. If a double-strand break is targeted near to a short target sequence, the deletion mutations caused by the NHEJ repair often span, and therefore remove, the unwanted nucleotides. For the deletion of larger DNA segments, introducing two double-strand breaks, one on each side of the sequence, can result in NHEJ between the ends with removal of the entire intervening sequence. Both of these approaches can be used to delete specific DNA sequences.

[0704] In one embodiment, composition, system, mediated NHEJ can be used in the method to delete small sequence motifs. In one embodiment, composition, system, mediated NHEJ can be used in the method to generate NHEJ-mediate indels that can be targeted to the gene, e.g., a coding region, e.g., an early coding region of a gene of interest can be used to knockout (i.e., eliminate expression of) a gene of interest. For example, early coding region of a gene of interest includes sequence immediately following a transcription start site, within a first exon of the coding sequence, or within 500 bp of the transcription start site (e.g., less than 500, 450, 400, 350, 300, 250, 200, 150, 100 or 50 bp). In an embodiment, in which a ωRNA or guide RNA and IscB polypeptide nuclease generate a double strand break for the purpose of inducing NHEJ-mediated indels, a ωRNA or guide RNA may be configured to position one double-strand break in close proximity to a nucleotide of the target position. In an embodiment, the cleavage site may be between 0-500 bp away from the target position (e.g., less than 500, 400, 300, 200, 100, 50, 40, 30, 25, 20, 15, 10, 9, 8, 7, 6, 5, 4, 3, 2 or 1 bp from the target position). In an embodiment, in which two ωRNA or guide RNAs complexing with one or more nickases induce two single strand breaks for the purpose of inducing NHEJ-mediated indels, two guide RNAs may be configured to position two single-strand breaks to provide for NHEJ repair a nucleotide of the target position.

[0705] For minimization of toxicity and off-target effect, it may be important to control the concentration of IscB polypeptide or CRISPR-associated IscB polypeptide nuclease mRNA and guide RNA delivered. Optimal concentrations of IscB polypeptide or CRISPR-associated IscB polypeptide nuclease mRNA and guide RNA can be determined by testing different concentrations in a cellular or non-human eukaryote animal model and using deep sequencing the analyze the extent of modification at potential off-target genomic loci. Alternatively, to minimize the level of toxicity and off-target effect, nickase mRNA (for example S. pyogenes Cas9 with the D10A mutation) can be delivered with a pair of guide RNAs targeting a site of interest. Guide sequences and strategies to minimize toxicity and off-target effects can be as in International Patent Publication No. WO 2014/093622 (PCT/US2013/074667); or, via mutation. Others are as described elsewhere herein.

[0706] Typically, in the context of an endogenous IscB polypeptide nuclease, formation of a IscB polypeptide nuclease or complex (comprising a guide sequence hybridized to a target sequence and complexed with one or more IscB polypeptide or CRISPR-associated IscB polypeptide nucleases) results in cleavage, nicking, and/or another modification of one or both strands in or near (e.g. within 1, 2, 3, 4, 5, 6, 7, 8, 9, 10, 20, 50, or more base pairs from) the target sequence.

[0707] In one embodiment, a method of modifying a target polynucleotide in a cell to treat or prevent a disease can include allowing a composition, system, or component thereof to bind to the target polynucleotide, e.g., to effect cleavage, nicking, or other modification as the composition, system, is capable of said target polynucleotide, thereby modifying the target polynucleotide, wherein the composition, system, or component thereof, complex with a guide sequence, and hybridize said guide sequence to a target sequence within the target polynucleotide, wherein said guide sequence is optionally linked to a ωRNA scaffold sequence. In some of these embodiments, the composition, system, or component thereof can be or include a IscB polypeptide or CRISPR-associated IscB polypeptide nuclease complexed with a guide sequence. In one embodiment, modification can include cleaving or nicking one or two strands at the location of the target sequence by one or more components of the composition, system, or component thereof.

[0708] The cleavage, nicking, or other modification capable of being performed by the composition, system, can modify transcription of a target polynucleotide. In one embodiment, modification of transcription can include decreasing transcription of a target polynucleotide. In one embodiment, modification can include increasing transcription of a target polynucleotide. In one embodiment, the method includes repairing said cleaved target polynucleotide by homologous recombination with a recombination template polynucleotide, wherein said repair results in a modification such as, but not limited to, an insertion, deletion, or substitution of one or more nucleotides of said target polynucleotide. In one embodiment, said modification results in one or more amino acid changes in a protein expressed from a gene comprising the target sequence. In one embodiment, the modification imparted by the composition, system, or component thereof provides a transcript and/or protein that can correct a disease or a symptom thereof, including but not limited to, any of those described in greater detail elsewhere herein.

[0709] In one embodiment, the method of treating or preventing a disease can include delivering one or more vectors or vector systems to a cell, such as a eukaryotic or prokaryotic cell, wherein one or more vectors or vector systems include the composition, system, or component thereof. In one embodiment, the vector(s) or vector system(s) can be a viral vector or vector system, such as an AAV or lentiviral vector system, which are described in greater detail elsewhere herein. In one embodiment, the method of treating or preventing a disease can include delivering one or more viral particles, such as an AAV or lentiviral particle, containing the composition, system, or component thereof. In one embodiment, the viral particle has a tissue specific tropism. In one embodiment, the viral particle has a liver, muscle, eye, heart, pancreas, kidney, neuron, epithelial cell, endothelial cell, astrocyte, glial cell, immune cell, or red blood cell specific tropism.

[0710] It will be understood that the composition and system, according to the invention as described herein, such as the composition and system, for use in the methods according to the invention as described herein, may be suitably used for any type of application known for composition, system, preferably in eukaryotes. In certain aspects, the application is therapeutic, preferably therapeutic in a eukaryote organism, such as including but not limited to animals (including human), plants, algae, fungi (including yeasts), etc. Alternatively, or in addition, in certain aspects, the application may involve accomplishing or inducing one or more particular traits or characteristics, such as genotypic and/or phenotypic traits or characteristics, as also described elsewhere herein.

### Treating Diseases of the Circulatory System

[0711] In one embodiment, the composition, system, and/or component thereof described herein can be used to treat and/or prevent a circulatory system disease. Exemplary disease is provided, for example, in Table 6. In one embodiment the plasma exosomes of Wahlgren et al. (Nucleic Acids Research, 2012, Vol. 40, No. 17 e130) can be used to deliver the composition, system, and/or component thereof described herein to the blood. In one embodiment, the circulatory system disease can be treated by using a lentivirus to deliver the composition, system, described herein to modify hematopoietic stem cells (HSCs) in vivo or ex vivo (see e.g. Drakopoulou, “Review Article, The Ongoing Challenge of Hematopoietic Stem Cell-Based Gene Therapy for β-Thalassemia,” Stem Cells International, Volume 2011, Article ID 987980, 10 pages, doi:10.4061/2011/987980, which can be adapted for use with the composition, system, herein in view of the description herein). In one embodiment, the circulatory system disorder can be treated by correcting HSCs as to the disease using a composition, system, herein or a component thereof, wherein the composition, system, optionally includes a suitable HDR repair template (see e.g. Cavazzana, “Outcomes of Gene Therapy for β-Thalassemia Major via Transplantation of Autologous Hematopoietic Stem Cells Transduced Ex Vivo with a Lentiviral PA-T87Q-Globin Vector.”; Cavazzana-Calvo, “Transfusion independence and HMGA2 activation after gene therapy of human β-thalassaemia”, Nature 467, 318-322 (16 Sep. 2010) doi:10.1038/nature09328; Nienhuis, “Development of Gene Therapy for Thalassemia, Cold Spring Harbor Perspectives in Medicine, doi: 10.1101/cshperspect.a011833 (2012), LentiGlobin BB305, a lentiviral vector containing an engineered β-globin gene (PA-T87Q); and Xie et al., “Seamless gene correction of β-thalassaemia mutations in patient-specific iPSCs using CRISPR/Cas9 and piggyback” Genome Research gr.173427.114 (2014) www.genome.org/cgi/doi/10.1101/gr.173427.114 (Cold Spring Harbor Laboratory Press;

[0712] Watts, “Hematopoietic Stem Cell Expansion and Gene Therapy” Cytotherapy 13(10):1164-1171. doi:10.3109/14653249.2011.620748 (2011), which can be adapted for use with the composition, system, herein in view of the description herein). In one embodiment, iPSCs can be modified using a composition, system, described herein to correct a disease polynucleotide associated with a circulatory disease. In this regard, the teachings of Xu et al. (Sci Rep. 2015 Jul. 9; 5:12065. doi: 10.1038/srep12065) and Song et al. (Stem Cells Dev. 2015 May 1; 24(9):1053-65. doi: 10.1089/scd.2014.0347. Epub 2015 Feb. 5) with respect to modifying iPSCs can be adapted for use in view of the description herein with the composition, system, described herein.

[0713] The term “Hematopoietic Stem Cell” or “HSC” refers broadly those cells considered to be an HSC, e.g., blood cells that give rise to all the other blood cells and are derived from mesoderm; located in the red bone marrow, which is contained in the core of most bones. HSCs of the invention include cells having a phenotype of hematopoietic stem cells, identified by small size, lack of lineage (lin) markers, and markers that belong to the cluster of differentiation series, like: CD34, CD38, CD90, CD133, CD105, CD45, and also c-kit,—the receptor for stem cell factor. Hematopoietic stem cells are negative for the markers that are used for detection of lineage commitment, and are, thus, called Lin−; and, during their purification by FACS, a number of up to 14 different mature blood-lineage markers, e.g., CD13 & CD33 for myeloid, CD71 for erythroid, CD19 for B cells, CD61 for megakaryocytic, etc. for humans; and, B220 (murine CD45) for B cells, Mac-1 (CD11b/CD18) for monocytes, Gr-1 for Granulocytes, Ter119 for erythroid cells, Il7Ra, CD3, CD4, CD5, CD8 for T cells, etc. Mouse HSC markers: CD34lo/−, SCA-1+, Thy1.1+/lo, CD38+, C-kit+, lin−, and Human HSC markers: CD34+, CD59+, Thy1/CD90+, CD38lo/−, C-kit/CD117+, and lin−. HSCs are identified by markers. Hence in embodiments discussed herein, the HSCs can be CD34+ cells. HSCs can also be hematopoietic stem cells that are CD34−/CD38−. Stem cells that may lack c-kit on the cell surface that are considered in the art as HSCs are within the ambit of the invention, as well as CD133+ cells likewise considered HSCs in the art.

[0714] In one embodiment, the treatment or prevention for treating a circulatory system or blood disease can include modifying a human cord blood cell with any modification described herein. In one embodiment, the treatment or prevention for treating a circulatory system or blood disease can include modifying a granulocyte colony-stimulating factor-mobilized peripheral blood cell (mPB) with any modification described herein. In one embodiment, the human cord blood cell or mPB can be CD34+. In one embodiment, the cord blood cell(s) or mPB cell(s) modified can be autologous. In one embodiment, the cord blood cell(s) or mPB cell(s) can be allogenic. In addition to the modification of the disease gene(s), allogenic cells can be further modified using the composition, system, described herein to reduce the immunogenicity of the cells when delivered to the recipient. Such techniques are described elsewhere herein and e.g. Cartier, “MINI-SYMPOSIUM: X-Linked Adrenoleukodystrophypa, Hematopoietic Stem Cell Transplantation and Hematopoietic Stem Cell Gene Therapy in X-Linked Adrenoleukodystrophy,” Brain Pathology 20 (2010) 857-862, which can be adapted for use with the composition, system, herein. The modified cord blood cell(s) or mPB cell(s) can be optionally expanded in vitro. The modified cord blood cell(s) or mPB cell(s) can be derived to a subject in need thereof using any suitable delivery technique.

[0715] The compositions may be engineered to target genetic locus or loci in HSCs. In one embodiment, the IscB polypeptide or CRISPR-associated IscB polypeptide nuclease(s) can be codon-optimized for a eukaryotic cell and especially a mammalian cell, e.g., a human cell, for instance, HSC, or iPSC and hRNA targeting a locus or loci in HSC, such as circulatory disease, can be prepared. These may be delivered via particles. The particles may be formed by the IscB polypeptide nuclease and the ωRNA being admixed. The ωRNA and IscB polypeptide nuclease mixture can be, for example, admixed with a mixture comprising or consisting essentially of or consisting of surfactant, phospholipid, biodegradable polymer, lipoprotein and alcohol, whereby particles containing the ωRNA and IscB polypeptide or CRISPR-associated IscB polypeptide nuclease may be formed. The invention comprehends so making particles and particles from such a method as well as uses thereof. Particles suitable delivery of the composition in the context of blood or circulatory system or HSC delivery to the blood or circulatory system are described in greater detail elsewhere herein.

[0716] In one embodiment, after ex vivo modification the HSCs or iPCS can be expanded prior to administration to the subject. Expansion of HSCs can be via any suitable method such as that described by, Lee, “Improved ex vivo expansion of adult hematopoietic stem cells by overcoming CUL4-mediated degradation of HOXB4.” Blood. 2013 May 16; 121(20):4082-9. doi: 10.1182/blood-2012-09-455204. Epub 2013 Mar. 21.

[0717] In one embodiment, the HSCs or iPSCs modified can be autologous. In one embodiment, the HSCs or iPSCs can be allogenic. In addition to the modification of the disease gene(s), allogenic cells can be further modified using the composition, system, described herein to reduce the immunogenicity of the cells when delivered to the recipient. Such techniques are described elsewhere herein and e.g. Cartier, “MINI-SYMPOSIUM: X-Linked Adrenoleukodystrophypa, Hematopoietic Stem Cell Transplantation and Hematopoietic Stem Cell Gene Therapy in X-Linked Adrenoleukodystrophy,” Brain Pathology 20 (2010) 857-862, which can be adapted for use with the composition, system, herein.

### Treating Neurological Diseases

[0718] In one embodiment, the compositions, systems, described herein can be used to treat diseases of the brain and CNS. Delivery options for the brain include encapsulation of IscB polypeptide nuclease and guide RNA in the form of either DNA or RNA into liposomes and conjugating to molecular Trojan horses for trans-blood brain barrier (BBB) delivery. Molecular Trojan horses have been shown to be effective for delivery of B-gal expression vectors into the brain of non-human primates. The same approach can be used to delivery vectors containing IscB polypeptide nuclease and guide RNA. For instance, Xia C F and Boado R J, Pardridge W M (“Antibody-mediated targeting of siRNA via the human insulin receptor using avidin-biotin technology.” Mol Pharm. 2009 May-June; 6(3):747-51. doi: 10.1021/mp800194) describes how delivery of short interfering RNA (siRNA) to cells in culture, and in vivo, is possible with combined use of a receptor-specific monoclonal antibody (mAb) and avidin-biotin technology. The authors also report that because the bond between the targeting mAb and the siRNA is stable with avidin-biotin technology, and RNAi effects at distant sites such as brain are observed in vivo following an intravenous administration of the targeted siRNA, the teachings of which can be adapted for use with the compositions, systems, herein. In other embodiments, an artificial virus can be generated for CNS and/or brain delivery. See e.g. Zhang et al. (Mol Ther. 2003 January; 7(1):11-8.)), the teachings of which can be adapted for use with the compositions, systems, herein.

### Treating Hearing Diseases

[0719] In one embodiment the composition and system described herein can be used to treat a hearing disease or hearing loss in one or both ears. Deafness is often caused by lost or damaged hair cells that cannot relay signals to auditory neurons. In such cases, cochlear implants may be used to respond to sound and transmit electrical signals to the nerve cells. But these neurons often degenerate and retract from the cochlea as fewer growth factors are released by impaired hair cells.

[0720] In one embodiment, the composition, system, or modified cells can be delivered to one or both ears for treating or preventing hearing disease or loss by any suitable method or technique. Suitable methods and techniques include, but are not limited to those set forth in US Patent Publication No. 20120328580 describes injection of a pharmaceutical composition into the ear (e.g., auricular administration), such as into the luminae of the cochlea (e.g., the Scala media, Sc vestibulae, and Sc tympani), e.g., using a syringe, e.g., a single-dose syringe. For example, one or more of the compounds described herein can be administered by intratympanic injection (e.g., into the middle ear), and/or injections into the outer, middle, and/or inner ear; administration in situ, via a catheter or pump (see e.g. McKenna et al., (U.S. Patent Publication No. 2006/0030837) and Jacobsen et al., (U.S. Pat. No. 7,206,639); administration in combination with a mechanical device such as a cochlear implant or a hearing aid, which is worn in the outer ear (see e.g. U.S. Patent Publication No. 2007/0093878, which provides an exemplary cochlear implant suitable for delivery of the compositions, systems, described herein to the ear). Such methods are routinely used in the art, for example, for the administration of steroids and antibiotics into human ears. Injection can be, for example, through the round window of the ear or through the cochlear capsule. Other inner ear administration methods are known in the art (see, e.g., Salt and Plontke, Drug Discovery Today, 10:1299-1306, 2005). In one embodiment, a catheter or pump can be positioned, e.g., in the ear (e.g., the outer, middle, and/or inner ear) of a patient during a surgical procedure. In one embodiment, a catheter or pump can be positioned, e.g., in the ear (e.g., the outer, middle, and/or inner ear) of a patient without the need for a surgical procedure.

[0721] In general, the cell therapy methods described in US Patent Publication No. 20120328580 can be used to promote complete or partial differentiation of a cell to or towards a mature cell type of the inner ear (e.g., a hair cell) in vitro. Cells resulting from such methods can then be transplanted or implanted into a patient in need of such treatment. The cell culture methods required to practice these methods, including methods for identifying and selecting suitable cell types, methods for promoting complete or partial differentiation of selected cells, methods for identifying complete or partially differentiated cell types, and methods for implanting complete or partially differentiated cells are described below.

[0722] Cells suitable for use in the present invention include, but are not limited to, cells that are capable of differentiating completely or partially into a mature cell of the inner ear, e.g., a hair cell (e.g., an inner and/or outer hair cell), when contacted, e.g., in vitro, with one or more of the compounds described herein. Exemplary cells that are capable of differentiating into a hair cell include, but are not limited to stem cells (e.g., inner ear stem cells, adult stem cells, bone marrow derived stem cells, embryonic stem cells, mesenchymal stem cells, skin stem cells, iPS cells, and fat derived stem cells), progenitor cells (e.g., inner ear progenitor cells), support cells (e.g., Deiters' cells, pillar cells, inner phalangeal cells, tectal cells and Hensen's cells), and/or germ cells. The use of stem cells for the replacement of inner ear sensory cells is described in Li et al., (U.S. Patent Publication No. 2005/0287127) and Li et al., (U.S. patent application Ser. No. 11/953,797). The use of bone marrow derived stem cells for the replacement of inner ear sensory cells is described in Edge et al., PCT/US2007/084654. iPS cells are described, e.g., at Takahashi et al., Cell, Volume 131, Issue 5, Pages 861-872 (2007); Takahashi and Yamanaka, Cell 126, 663-76 (2006); Okita et al., Nature 448, 260-262 (2007); Yu, J. et al., Science 318(5858):1917-1920 (2007); Nakagawa et al., Nat. Biotechnol. 26:101-106 (2008); and Zaehres and Scholer, Cell 131(5):834 −835 (2007). Such suitable cells can be identified by analyzing (e.g., qualitatively or quantitatively) the presence of one or more tissue specific genes. For example, gene expression can be detected by detecting the protein product of one or more tissue-specific genes. Protein detection techniques involve staining proteins (e.g., using cell extracts or whole cells) using antibodies against the appropriate antigen. In this case, the appropriate antigen is the protein product of the tissue-specific gene expression. Although, in principle, a first antibody (i.e., the antibody that binds the antigen) can be labeled, it is more common (and improves the visualization) to use a second antibody directed against the first (e.g., an anti-IgG). This second antibody is conjugated either with fluorochromes, or appropriate enzymes for colorimetric reactions, or gold beads (for electron microscopy), or with the biotin-avidin system, so that the location of the primary antibody, and thus the antigen, can be recognized.

[0723] The composition and system may be delivered to the ear by direct application of pharmaceutical composition to the outer ear, with compositions modified from US Patent Publication No. 20110142917. In one embodiment the pharmaceutical composition is applied to the ear canal. Delivery to the ear may also be referred to as aural or otic delivery.

[0724] In one embodiment, the compositions, systems, or components thereof and/or vectors or vector systems can be delivered to ear via a transfection to the inner ear through the intact round window by a novel proteidic delivery technology which may be applied to the nucleic acid-targeting system of the present invention (see, e.g., Qi et al., Gene Therapy (2013), 1-9). About 40 μl of 10 mM RNA may be contemplated as the dosage for administration to the ear.

[0725] According to Rejali et al. (Hear Res. 2007 June; 228(1-2):180-7), cochlear implant function can be improved by good preservation of the spiral ganglion neurons, which are the target of electrical stimulation by the implant and brain derived neurotrophic factor (BDNF) has previously been shown to enhance spiral ganglion survival in experimentally deafened ears. Rejali et al. tested a modified design of the cochlear implant electrode that includes a coating of fibroblast cells transduced by a viral vector with a BDNF gene insert. To accomplish this type of ex vivo gene transfer, Rejali et al. transduced guinea pig fibroblasts with an adenovirus with a BDNF gene cassette insert, and determined that these cells secreted BDNF and then attached BDNF-secreting cells to the cochlear implant electrode via an agarose gel, and implanted the electrode in the scala tympani. Rejali et al. determined that the BDNF expressing electrodes were able to preserve significantly more spiral ganglion neurons in the basal turns of the cochlea after 48 days of implantation when compared to control electrodes and demonstrated the feasibility of combining cochlear implant therapy with ex vivo gene transfer for enhancing spiral ganglion neuron survival. Such a system may be applied to the nucleic acid-targeting system of the present invention for delivery to the ear.

[0726] In one embodiment, the system set forth in Mukherjea et al. (Antioxidants & Redox Signaling, Volume 13, Number 5, 2010) can be adapted for transtympanic administration of the composition, system, or component thereof to the ear. In one embodiment, a dosage of about 2 mg to about 4 mg of IscB polypeptide or CRISPR-associated IscB polypeptide nuclease for administration to a human.

[0727] In one embodiment, the system set forth in [Jung et al. (Molecular Therapy, vol. 21 no. 4, 834 −841 April 2013) can be adapted for vestibular epithelial delivery of the composition, system, or component thereof to the ear. In one embodiment, a dosage of about 1 to about 30 mg of IscB polypeptide nuclease for administration to a human.

### Treating Diseases in Non-Dividing Cells

[0728] In one embodiment, the gene or transcript to be corrected is in a non-dividing cell. Exemplary non-dividing cells are muscle cells or neurons. Non-dividing (especially non-dividing, fully differentiated) cell types present issues for gene targeting or genome engineering, for example because homologous recombination (HR) is generally suppressed in the G1 cell-cycle phase. However, while studying the mechanisms by which cells control normal DNA repair systems, Durocher discovered a previously unknown switch that keeps HR “off” in non-dividing cells and devised a strategy to toggle this switch back on. Orthwein et al. (Daniel Durocher's lab at the Mount Sinai Hospital in Ottawa, Canada) recently reported (Nature 16142, published online 9 Dec. 2015) have shown that the suppression of HR can be lifted and gene targeting successfully concluded in both kidney (293T) and osteosarcoma (U2OS) cells. Tumor suppressors, BRCA1, PALB2 and BRAC2 are known to promote DNA DSB repair by HR. They found that formation of a complex of BRCA1 with PALB2-BRAC2 is governed by a ubiquitin site on PALB2, such that action on the site by an E3 ubiquitin ligase. This E3 ubiquitin ligase is composed of KEAP1 (a PALB2-interacting protein) in complex with cullin-3 (CUL3)-RBX1. PALB2 ubiquitylation suppresses its interaction with BRCA1 and is counteracted by the deubiquitylase USP11, which is itself under cell cycle control. Restoration of the BRCA1-PALB2 interaction combined with the activation of DNA-end resection is sufficient to induce homologous recombination in G1, as measured by a number of methods including a IscB polypeptide nuclease-based gene-targeting assay directed at USP11 or KEAP1 (expressed from a pX459 vector). However, when the BRCA1-PALB2 interaction was restored in resection-competent G1 cells using either KEAP1 depletion or expression of the PALB2-KR mutant, a robust increase in gene-targeting events was detected. These teachings can be adapted for and/or applied to the compositions, systems, described herein.

[0729] Thus, reactivation of HR in cells, especially non-dividing, fully differentiated cell types is preferred, In one embodiment. In one embodiment, promotion of the BRCA1-PALB2 interaction is preferred In one embodiment. In one embodiment, the target ell is a non-dividing cell. In one embodiment, the target cell is a neuron or muscle cell. In one embodiment, the target cell is targeted in vivo. In one embodiment, the cell is in G1 and HR is suppressed. In one embodiment, use of KEAP1 depletion, for example inhibition of expression of KEAP1 activity, is preferred. KEAP1 depletion may be achieved through siRNA, for example as shown in Orthwein et al. Alternatively, expression of the PALB2-KR mutant (lacking all eight Lys residues in the BRCA1-interaction domain is preferred, either in combination with KEAP1 depletion or alone. PALB2-KR interacts with BRCA1 irrespective of cell cycle position. Thus, promotion or restoration of the BRCA1-PALB2 interaction, especially in G1 cells, is preferred In one embodiment, especially where the target cells are non-dividing, or where removal and return (ex vivo gene targeting) is problematic, for example neuron or muscle cells. KEAP1 siRNA is available from ThermoFischer. In one embodiment, a BRCA1-PALB2 complex may be delivered to the G1 cell. In one embodiment, PALB2 deubiquitylation may be promoted for example by increased expression of the deubiquitylase USP11, so it is envisaged that a construct may be provided to promote or up-regulate expression or activity of the deubiquitylase USP11.

### Treating Diseases of the Eye

[0730] In one embodiment, the disease to be treated is a disease that affects the eyes. Thus, In one embodiment, the composition, system, or component thereof described herein is delivered to one or both eyes.

[0731] The composition, system, can be used to correct ocular defects that arise from several genetic mutations further described in Genetic Diseases of the Eye, Second Edition, edited by Elias I. Traboulsi, Oxford University Press, 2012.

[0732] In one embodiment, the condition to be treated or targeted is an eye disorder. In one embodiment, the eye disorder may include glaucoma. In one embodiment, the eye disorder includes a retinal degenerative disease. In one embodiment, the retinal degenerative disease is selected from Stargardt disease, Bardet-Biedl Syndrome, Best disease, Blue Cone Monochromacy, Choroidermia, Cone-rod dystrophy, Congenital Stationary Night Blindness, Enhanced S-Cone Syndrome, Juvenile X-Linked Retinoschisis, Leber Congenital Amaurosis, Malattia Leventinesse, Norrie Disease or X-linked Familial Exudative Vitreoretinopathy, Pattern Dystrophy, Sorsby Dystrophy, Usher Syndrome, Retinitis Pigmentosa, Achromatopsia or Macular dystrophies or degeneration, Retinitis Pigmentosa, Achromatopsia, and age related macular degeneration. In one embodiment, the retinal degenerative disease is Leber Congenital Amaurosis (LCA) or Retinitis Pigmentosa. Other exemplary eye diseases are described in greater detail elsewhere herein.

[0733] In one embodiment, the composition, system, is delivered to the eye, optionally via intravitreal injection or subretinal injection. Intraocular injections may be performed with the aid of an operating microscope. For subretinal and intravitreal injections, eyes may be prolapsed by gentle digital pressure and fundi visualized using a contact lens system consisting of a drop of a coupling medium solution on the cornea covered with a glass microscope slide coverslip. For subretinal injections, the tip of a 10-mm 34-gauge needle, mounted on a 5-μl Hamilton syringe may be advanced under direct visualization through the superior equatorial sclera tangentially towards the posterior pole until the aperture of the needle was visible in the subretinal space. Then, 2 μl of vector suspension may be injected to produce a superior bullous retinal detachment, thus confirming subretinal vector administration. This approach creates a self-sealing sclerotomy allowing the vector suspension to be retained in the subretinal space until it is absorbed by the RPE, usually within 48 h of the procedure. This procedure may be repeated in the inferior hemisphere to produce an inferior retinal detachment. This technique results in the exposure of approximately 70% of neurosensory retina and RPE to the vector suspension. For intravitreal injections, the needle tip may be advanced through the sclera 1 mm posterior to the corneoscleral limbus and 2 μl of vector suspension injected into the vitreous cavity. For intracameral injections, the needle tip may be advanced through a corneoscleral limbal paracentesis, directed towards the central cornea, and 2 μl of vector suspension may be injected. For intracameral injections, the needle tip may be advanced through a corneoscleral limbal paracentesis, directed towards the central cornea, and 2 μl of vector suspension may be injected. These vectors may be injected at titers of either 1.0-1.4×10¹⁰ or 1.0-1.4×10⁹ transducing units (TU)/ml.

[0734] In one embodiment, for administration to the eye, lentiviral vectors. In one embodiment, the lentiviral vector is an equine infectious anemia virus (EIAV) vector. Exemplary EIAV vectors for eye delivery are described in Balagaan, J Gene Med 2006; 8: 275-285, Published online 21 Nov. 2005 in Wiley InterScience (www.interscience.wiley.com). DOI: 10.1002/jgm.845; Binley et al., HUMAN GENE THERAPY 23:980-991 (September 2012), which can be adapted for use with the composition, system, described herein. In one embodiment, the dosage can be 1.1×10⁵ transducing units per eye (TU/eye) in a total volume of 100 μl.

[0735] Other viral vectors can also be used for delivery to the eye, such as AAV vectors, such as those described in Campochiaro et al., Human Gene Therapy 17:167-176 (February 2006), Millington-Ward et al. (Molecular Therapy, vol. 19 no. 4, 642-649 April 2011; Dalkara et al. (Sci Transl Med 5, 189ra76 (2013)), which can be adapted for use with the composition, system, described herein. In one embodiment, the dose can range from about 10⁶ to 10^{9.5} particle units. In the context of the Millington-Ward AAV vectors, a dose of about 2×10¹¹ to about 6×10¹³ virus particles can be administered. In the context of Dalkara vectors, a dose of about 1×10¹⁵ to about 1×10¹⁶ vg/ml administered to a human.

[0736] In one embodiment, the sd-rxRNA® system of RXi Pharmaceuticals may be used/and or adapted for delivering composition, system, to the eye. In this system, a single intravitreal administration of 3 μg of sd-rxRNA results in sequence-specific reduction of PPIB mRNA levels for 14 days. The sd-rxRNA® system may be applied to the nucleic acid-targeting system of the present invention, contemplating a dose of about 3 to 20 mg of composition administered to a human.

[0737] In other embodiments, the methods of US Patent Publication No. 20130183282, which is directed to methods of cleaving a target sequence from the human rhodopsin gene, may also be modified to the nucleic acid-targeting system of the present invention.

[0738] In other embodiments, the methods of US Patent Publication No. 20130202678 for treating retinopathies and sight-threatening ophthalmologic disorders relating to delivering of the Puf-A gene (which is expressed in retinal ganglion and pigmented cells of eye tissues and displays a unique anti-apoptotic activity) to the sub-retinal or intravitreal space in the eye may be used or adapted. In particular, desirable targets are zgc:193933, prdm1a, spata2, tex10, rbb4, ddx3, zp2.2, Blimp-1 and HtrA2, all of which may be targeted by the composition, system, of the present invention.

[0739] Wu (Cell Stem Cell, 13:659-62, 2013) designed a guide RNA that led Cas9to a single base pair mutation that causes cataracts in mice, where it induced DNA cleavage. Then using either the other wild-type allele or oligos given to the zygotes repair mechanisms corrected the sequence of the broken allele and corrected the cataract-causing genetic defect in mutant mouse. This approach can be adapted to and/or applied to the compositions, systems, described herein.

[0740] US Patent Publication No. 20120159653, describes use of zinc finger nucleases to genetically modify cells, animals and proteins associated with macular degeneration (MD), the teachings of which can be applied to and/or adapted for the compositions, systems, described herein.

[0741] One aspect of US Patent Publication No. 20120159653 relates to editing of any chromosomal sequences that encode proteins associated with MD which may be applied to the nucleic acid-targeting system of the present invention.

### Treating Muscle Diseases and Cardiovascular Diseases

[0742] In one embodiment, the composition, system can be used to treat and/or prevent a muscle disease and associated circulatory or cardiovascular disease or disorder. The present invention also contemplates delivering the composition, system, described herein, e.g. IscB polypeptide or CRISPR-associated IscB polypeptide systems, to the heart. For the heart, a myocardium tropic adeno-associated virus (AAVM) is preferred, in particular AAVM41 which showed preferential gene transfer in the heart (see, e.g., Lin-Yanga et al., PNAS, Mar. 10, 2009, vol. 106, no. 10). Administration may be systemic or local. A dosage of about 1-10×10¹⁴ vector genomes are contemplated for systemic administration. See also, e.g., Eulalio et al. (2012) Nature 492: 376 and Somasuntharam et al. (2013) Biomaterials 34: 7790, the teachings of which can be adapted for and/or applied to the compositions, systems, described herein.

[0743] For example, US Patent Publication No. 20110023139, the teachings of which can be adapted for and/or applied to the compositions, systems, described herein describes use of zinc finger nucleases to genetically modify cells, animals and proteins associated with cardiovascular disease. Cardiovascular diseases generally include high blood pressure, heart attacks, heart failure, and stroke and TIA. Any chromosomal sequence involved in cardiovascular disease or the protein encoded by any chromosomal sequence involved in cardiovascular disease may be utilized in the methods described in this disclosure. The cardiovascular-related proteins are typically selected based on an experimental association of the cardiovascular-related protein to the development of cardiovascular disease. For example, the production rate or circulating concentration of a cardiovascular-related protein may be elevated or depressed in a population having a cardiovascular disorder relative to a population lacking the cardiovascular disorder. Differences in protein levels may be assessed using proteomic techniques including but not limited to Western blot, immunohistochemical staining, enzyme linked immunosorbent assay (ELISA), and mass spectrometry. Alternatively, the cardiovascular-related proteins may be identified by obtaining gene expression profiles of the genes encoding the proteins using genomic techniques including but not limited to DNA microarray analysis, serial analysis of gene expression (SAGE), and quantitative real-time polymerase chain reaction (Q-PCR).

[0744] The compositions, systems, herein can be used for treating diseases of the muscular system. The present invention also contemplates delivering the composition, system, described herein, effector protein systems, to muscle(s).

[0745] In one embodiment, the muscle disease to be treated is a muscle dystrophy such as DMD. In one embodiment, the composition, system, such as a system capable of RNA modification, described herein can be used to achieve exon skipping to achieve correction of the diseased gene. As used herein, the term “exon skipping” refers to the modification of pre-mRNA splicing by the targeting of splice donor and/or acceptor sites within a pre-mRNA with one or more complementary antisense oligonucleotide(s) (AONs). By blocking access of a spliceosome to one or more splice donor or acceptor site, an AON may prevent a splicing reaction thereby causing the deletion of one or more exons from a fully-processed mRNA. Exon skipping may be achieved in the nucleus during the maturation process of pre-mRNAs. In some examples, exon skipping may include the masking of key sequences involved in the splicing of targeted exons by using a composition, system, described herein capable of RNA modification. In one embodiment, exon skipping can be achieved in dystrophin mRNA. In one embodiment, the composition, system, can induce exon skipping at exon 1, 2, 3, 4, 5, 6, 7, 8, 10, 11, 12, 13, 14, 15, 16, 17, 18, 19, 20, 21, 22, 23, 24, 25, 26, 27, 28, 29, 30, 31, 32, 33, 34, 45, 36, 37, 38, 39, 40, 41, 42, 43, 44, 45, 46, 47, 48, 49, 50, 51, 52, 53, 54, 55, 56, 57, 58, 59, 60, 61, 62, 63, 64, 65, 66, 67, 68, 69, 70, 71, 72, 73, 74, 75, 76, 77, 78, 79, or any combination thereof of the dystrophin mRNA. In one embodiment, the composition, system, can induce exon skipping at exon 43, 44, 50, 51, 52, 55, or any combination thereof of the dystrophin mRNA. Mutations in these exons, can also be corrected using non-exon skipping polynucleotide modification methods.

[0746] In one embodiment, for treatment of a muscle disease, the method of Bortolanza et al. Molecular Therapy vol. 19 no. 11, 2055-264 November 2011) may be applied to an AAV expressing IscB polypeptide or CRISPR-associated IscB polypeptide nuclease and injected into humans at a dosage of about 2×10¹⁵ or 2×10¹⁶ vg of vector. The teachings of Bortolanza et al., can be adapted for and/or applied to the compositions, systems, described herein.

[0747] In one embodiment, the method of Dumonceaux et al. (Molecular Therapy vol. 18 no. 5, 881-887 May 2010) may be applied to an AAV expressing IscB polypeptide or CRISPR-associated IscB polypeptide nuclease and injected into humans, for example, at a dosage of about 10¹⁴ to about 10¹⁵ vg of vector. The teachings of Dumonceaux described herein can be adapted for and/or applied to the compositions, systems, described herein.

[0748] In one embodiment, the method of Kinouchi et al. (Gene Therapy (2008) 15, 1126-1130) may be applied to compositions described herein and injected into a human, for example, at a dosage of about 500 to 1000 ml of a 40 μM solution into the muscle.

[0749] In one embodiment, the method of Hagstrom et al. (Molecular Therapy Vol. 10, No. 2, August 2004) can be adapted for and/or applied to the compositions, systems, herein and injected at a dose of about 15 to about 50 mg into the great saphenous vein of a human.

[0750] In one embodiment, the method comprise treating a sickle cell related disease, e.g., sickle cell trait, sickle cell disease such as sickle cell anemia, β-thalassaemia. For example, the method and system may be used to modify the genome of the sickle cell, e.g., by correcting one or more mutations of the β-globin gene. In the case of β-thalassaemia, sickle cell anemia can be corrected by modifying HSCs with the systems. The system allows the specific editing of the cell's genome by cutting its DNA and then letting it repair itself. The IscB polypeptide nuclease is inserted and directed by a RNA guide to the mutated point and then it cuts the DNA at that point. Simultaneously, a healthy version of the sequence is inserted. This sequence is used by the cell's own repair system to fix the induced cut. In this way, the IscB polypeptide or CRISPR-associated IscB polypeptide nuclease allows the correction of the mutation in the previously obtained stem cells. The methods and systems may be used to correct HSCs as to sickle cell anemia using a systems that targets and corrects the mutation (e.g., with a suitable HDR template that delivers a coding sequence for β-globin, advantageously non-sickling p-globin); specifically, the guide RNA can target mutation that give rise to sickle cell anemia, and the HDR can provide coding for proper expression of β-globin. An ωRNA or guide RNA that targets the mutation-and-IscB polypeptide nuclease containing particle is contacted with HSCs carrying the mutation. The particle also can contain a suitable HDR template to correct the mutation for proper expression of β-globin; or the HSC can be contacted with a second particle or a vector that contains or delivers the HDR template. The so contacted cells can be administered; and optionally treated/expanded; cf. Cartier. The HDR template can provide for the HSC to express an engineered β-globin gene (e.g., βA-T87Q), or β-globin.

### Treating Diseases of the Liver and Kidney

[0751] In one embodiment, the composition, system, or component thereof described herein can be used to treat a disease of the kidney or liver. Thus, In one embodiment, delivery of the composition or component thereof described herein is to the liver or kidney.

[0752] Delivery strategies to induce cellular uptake of the therapeutic nucleic acid include physical force or vector systems such as viral-, lipid- or complex-based delivery, or nanocarriers. From the initial applications with less possible clinical relevance, when nucleic acids were addressed to renal cells with hydrodynamic high-pressure injection systemically, a wide range of gene therapeutic viral and non-viral carriers have been applied already to target posttranscriptional events in different animal kidney disease models in vivo (Csaba Revesz and Peter Hamar (2011). Delivery Methods to Target RNAs in the Kidney, Gene Therapy Applications, Prof Chunsheng Kang (Ed.), ISBN: 978-953-307-541-9, InTech, Available from: www.intechopen.com/books/gene-therapy-applications/delivery-methods-to-target-rnas-inthe-kidney). Delivery methods to the kidney may include those in Yuan et al. (Am J Physiol Renal Physiol 295: F605-F617, 2008). The method of Yuang et al. may be applied to the composition of the present invention contemplating a 1-2 g subcutaneous injection of IscB polypeptide nuclease conjugated with cholesterol to a human for delivery to the kidneys. In one embodiment, the method of Molitoris et al. (J Am Soc Nephrol 20: 1754-1764, 2009) can be adapted to the composition and a cumulative dose of 12-20 mg/kg to a human can be used for delivery to the proximal tubule cells of the kidneys. In one embodiment, the methods of Thompson et al. (Nucleic Acid Therapeutics, Volume 22, Number 4, 2012) can be adapted to the compositions and a dose of up to 25 mg/kg can be delivered via i.v. administration. In one embodiment, the method of Shimizu et al. (J Am Soc Nephrol 21: 622-633, 2010) can be adapted to the compositions and a dose of about of 10-20 μmol compositions complexed with nanocarriers in about 1-2 liters of a physiologic fluid for i.p. administration can be used.

[0753] Other various delivery vehicles can be used to deliver the composition, system to the kidney such as viral, hydrodynamic, lipid, polymer nanoparticles, aptamers and various combinations thereof (see e.g. Larson et al., Surgery, (August 2007), Vol. 142, No. 2, pp. (262-269); Hamar et al., Proc Natl Acad Sci, (October 2004), Vol. 101, No. 41, pp. (14883-14888); Zheng et al., Am J Pathol, (October 2008), Vol. 173, No. 4, pp. (973-980); Feng et al., Transplantation, (May 2009), Vol. 87, No. 9, pp. (1283-1289); Q. Zhang et al., PloS ONE, (July 2010), Vol. 5, No. 7, e11709, pp. (1-13); Kushibikia et al., J Controlled Release, (July 2005), Vol. 105, No. 3, pp. (318-331); Wang et al., Gene Therapy, (July 2006), Vol. 13, No. 14, pp. (1097-1103); Kobayashi et al., Journal of Pharmacology and Experimental Therapeutics, (February 2004), Vol. 308, No. 2, pp. (688-693); Wolfrum et al., Nature Biotechnology, (September 2007), Vol. 25, No. 10, pp. (1149-1157); Molitoris et al., J Am Soc Nephrol, (August 2009), Vol. 20, No. 8 pp. (1754-1764); Mikhaylova et al., Cancer Gene Therapy, (March 2011), Vol. 16, No. 3, pp. (217-226); Y. Zhang et al., J Am Soc Nephrol, (April 2006), Vol. 17, No. 4, pp. (1090-1101); Singhal et al., Cancer Res, (May 2009), Vol. 69, No. 10, pp. (4244-4251); Malek et al., Toxicology and Applied Pharmacology, (April 2009), Vol. 236, No. 1, pp. (97-108); Shimizu et al., J Am Soc Nephrology, (April 2010), Vol. 21, No. 4, pp. (622-633); Jiang et al., Molecular Pharmaceutics, (May-June 2009), Vol. 6, No. 3, pp. (727-737); Cao et al, J Controlled Release, (June 2010), Vol. 144, No. 2, pp. (203-212); Ninichuk et al., Am J Pathol, (March 2008), Vol. 172, No. 3, pp. (628-637); Purschke et al., Proc Natl Acad Sci, (March 2006), Vol. 103, No. 13, pp. (5173-5178).

[0754] In one embodiment, delivery is to liver cells. In one embodiment, the liver cell is a hepatocyte. Delivery of the composition and system herein may be via viral vectors, especially AAV (and in particular AAV2/6) vectors. These can be administered by intravenous injection. A preferred target for the liver, whether in vitro or in vivo, is the albumin gene. This is a so-called ‘safe harbor” as albumin is expressed at very high levels and so some reduction in the production of albumin following successful gene editing is tolerated. It is also preferred as the high levels of expression seen from the albumin promoter/enhancer allows for useful levels of correct or transgene production (from the inserted recombination template) to be achieved even if only a small fraction of hepatocytes are edited. See sites identified by Wechsler et al. (reported at the 57th Annual Meeting and Exposition of the American Society of Hematology—abstract available online at ash.confex.com/ash/2015/webprogram/Paper86495.html and presented on 6th December 2015) which can be adapted for use with the compositions, systems, herein.

[0755] Exemplary liver and kidney diseases that can be treated and/or prevented are described elsewhere herein.

### Treating Epithelial and Lung Diseases

[0756] In one embodiment, the disease treated or prevented by the composition and system described herein can be a lung or epithelial disease. The compositions and systems described herein can be used for treating epithelial and/or lung diseases. The present invention also contemplates delivering the composition, system, described herein, to one or both lungs.

[0757] In one embodiment, as viral vector can be used to deliver the composition, system, or component thereof to the lungs. In one embodiment, the AAV is an AAV-1, AAV-2, AAV-5, AAV-6, and/or AAV-9 for delivery to the lungs. (see, e.g., Li et al., Molecular Therapy, vol. 17 no. 12, 2067-277 December 2009). In one embodiment, the MOI can vary from 1×10′ to 4×10⁵ vector genomes/cell. In one embodiment, the delivery vector can be an RSV vector as in Zamora et al. (Am J Respir Crit Care Med Vol 183. pp 531-538, 2011. The method of Zamora et al. may be applied to the nucleic acid-targeting system of the present invention and an aerosolized composition, for example with a dosage of 0.6 mg/kg, may be contemplated for the present invention.

[0758] Subjects treated for a lung disease may for example receive pharmaceutically effective amount of aerosolized AAV vector system per lung endobronchially delivered while spontaneously breathing. As such, aerosolized delivery is preferred for AAV delivery in general. An adenovirus or an AAV particle may be used for delivery. Suitable gene constructs, each operably linked to one or more regulatory sequences, may be cloned into the delivery vector. In this instance, the following constructs are provided as examples: Cbh or EF1a promoter for Cas, U6 or H1 promoter for guide RNA): A preferred arrangement is to use a CFTRdelta508 targeting guide, a repair template for deltaF508 mutation and a codon optimized composition, with optionally one or more nuclear localization signal or sequence(s) (NLS(s)), e.g., two (2) NLSs.

### Treating Diseases of the Skin

[0759] The compositions and systems described herein can be used for the treatment of skin diseases. The present invention also contemplates delivering the composition and system, described herein, to the skin.

[0760] In one embodiment, delivery to the skin (intradermal delivery) of the composition, system, or component thereof can be via one or more microneedles or microneedle containing device. For example, In one embodiment the device and methods of Hickerson et al. (Molecular Therapy-Nucleic Acids (2013) 2, e129) can be used and/or adapted to deliver the composition, system, described herein, for example, at a dosage of up to 300 μl of 0.1 mg/ml compositions to the skin.

[0761] In one embodiment, the methods and techniques of Leachman et al. (Molecular Therapy, vol. 18 no. 2, 442-446 February 2010) can be used and/or adapted for delivery of a compositions described herein to the skin.

[0762] In one embodiment, the methods and techniques of Zheng et al. (PNAS, Jul. 24, 2012, vol. 109, no. 30, 11975-11980) can be used and/or adapted for nanoparticle delivery of a compositions described herein to the skin. In one embodiment, as dosage of about 25 nM applied in a single application can achieve gene knockdown in the skin.

### Treating Cancer

[0763] The compositions, systems, described herein can be used for the treatment of cancer. The present invention also contemplates delivering the composition, system, described herein, to a cancer cell. Also, as is described elsewhere herein the compositions, systems, can be used to modify an immune cell, such as a CAR or CAR T cell, which can then in turn be used to treat and/or prevent cancer. This is also described in International Patent Publication No. WO 2015/161276, the disclosure of which is hereby incorporated by reference and described herein below.

[0764] Target genes suitable for the treatment or prophylaxis of cancer can include those set forth in Tables 7 and 8. In one embodiment, target genes for cancer treatment and prevention can also include those described in International Patent Publication No. WO 2015/048577 the disclosure of which is hereby incorporated by reference and can be adapted for and/or applied to the composition, system, described herein.

### Adoptive Cell Therapy

[0765] The compositions, systems, and components thereof described herein can be used to modify cells for an adoptive cell therapy. In an aspect of the invention, methods and compositions which involve editing a target nucleic acid sequence, or modulating expression of a target nucleic acid sequence, and applications thereof in connection with cancer immunotherapy are comprehended by adapting the composition, system, of the present invention. In some examples, the compositions, systems, and methods may be used to modify a stem cell (e.g., induced pluripotent cell) to derive modified natural killer cells, gamma delta T cells, and alpha beta T cells, which can be used for the adoptive cell therapy. In certain examples, the compositions, systems, and methods may be used to modify modified natural killer cells, gamma delta T cells, and alpha beta T cells.

[0766] As used herein, “ACT”, “adoptive cell therapy” and “adoptive cell transfer” may be used interchangeably. In an embodiment, Adoptive cell therapy (ACT) can refer to the transfer of cells to a patient with the goal of transferring the functionality and characteristics into the new host by engraftment of the cells (see, e.g., Mettananda et al., Editing an α-globin enhancer in primary human hematopoietic stem cells as a treatment for β-thalassemia, Nat Commun. 2017 Sep. 4; 8(1):424). As used herein, the term “engraft” or “engraftment” refers to the process of cell incorporation into a tissue of interest in vivo through contact with existing cells of the tissue. Adoptive cell therapy (ACT) can refer to the transfer of cells, most commonly immune-derived cells, back into the same patient or into a new recipient host with the goal of transferring the immunologic functionality and characteristics into the new host. If possible, use of autologous cells helps the recipient by minimizing GVHD issues. The adoptive transfer of autologous tumor infiltrating lymphocytes (TIL) (Zacharakis et al., (2018) Nat Med. 2018 June; 24(6):724-730; Besser et al., (2010) Clin. Cancer Res 16 (9) 2646-55; Dudley et al., (2002) Science 298 (5594): 850-4; and Dudley et al., (2005) Journal of Clinical Oncology 23 (10): 2346-57.) or genetically re-directed peripheral blood mononuclear cells (Johnson et al., (2009) Blood 114 (3): 535-46; and Morgan et al., (2006) Science 314(5796) 126-9) has been used to successfully treat patients with advanced solid tumors, including melanoma, metastatic breast cancer and colorectal carcinoma, as well as patients with CD19-expressing hematologic malignancies (Kalos et al., (2011) Science Translational Medicine 3 (95): 95ra73). In an embodiment, allogenic cells immune cells are transferred (see, e.g., Ren et al., (2017) Clin Cancer Res 23 (9) 2255-2266). As described further herein, allogenic cells can be edited to reduce alloreactivity and prevent graft-versus-host disease. Thus, use of allogenic cells allows for cells to be obtained from healthy donors and prepared for use in patients as opposed to preparing autologous cells from a patient after diagnosis.

[0767] Aspects of the invention involve the adoptive transfer of immune system cells, such as T cells, specific for selected antigens, such as tumor associated antigens or tumor specific neoantigens (see, e.g., Maus et al., 2014, Adoptive Immunotherapy for Cancer or Viruses, Annual Review of Immunology, Vol. 32: 189-225; Rosenberg and Restifo, 2015, Adoptive cell transfer as personalized immunotherapy for human cancer, Science Vol. 348 no. 6230 pp. 62-68; Restifo et al., 2015, Adoptive immunotherapy for cancer: harnessing the T cell response. Nat. Rev. Immunol. 12(4): 269-281; and Jenson and Riddell, 2014, Design and implementation of adoptive therapy with chimeric antigen receptor-modified T cells. Immunol Rev. 257(1): 127-144; and Rajasagi et al., 2014, Systematic identification of personal tumor-specific neoantigens in chronic lymphocytic leukemia. Blood. 2014 Jul. 17; 124(3):453-62).

[0768] In an embodiment, an antigen (such as a tumor antigen) to be targeted in adoptive cell therapy (such as particularly CAR or TCR T-cell therapy) of a disease (such as particularly of tumor or cancer) may be selected from a group consisting of: MR1 (see, e.g., Crowther, et al., 2020, Genome-wide CRISPR-Cas9 screening reveals ubiquitous T cell cancer targeting via the monomorphic MHC class I-related protein MR1, Nature Immunology vol. 21, pages 178-185), B cell maturation antigen (BCMA) (see, e.g., Friedman et al., Effective Targeting of Multiple BCMA-Expressing Hematological Malignancies by Anti-BCMA CAR T Cells, Hum Gene Ther. 2018 Mar. 8; Berdeja J G, et al. Durable clinical responses in heavily pretreated patients with relapsed/refractory multiple myeloma: updated results from a multicenter study of bb2121 anti-Bcma CAR T cell therapy. Blood. 2017; 130:740; and Mouhieddine and Ghobrial, Immunotherapy in Multiple Myeloma: The Era of CAR T Cell Therapy, Hematologist, May-June 2018, Volume 15, issue 3); PSA (prostate-specific antigen); prostate-specific membrane antigen (PSMA); PSCA (Prostate stem cell antigen); Tyrosine-protein kinase transmembrane receptor ROR1; fibroblast activation protein (FAP); Tumor-associated glycoprotein 72 (TAG72); Carcinoembryonic antigen (CEA); Epithelial cell adhesion molecule (EPCAM); Mesothelin; Human Epidermal growth factor Receptor 2 (ERBB2 (Her2/neu)); Prostase; Prostatic acid phosphatase (PAP); elongation factor 2 mutant (ELF2M); Insulin-like growth factor 1 receptor (IGF-1R); gplOO; BCR-ABL (breakpoint cluster region-Abelson); tyrosinase; New York esophageal squamous cell carcinoma 1 (NY-ESO-1); K-light chain, LAGE (L antigen); MAGE (melanoma antigen); Melanoma-associated antigen 1 (MAGE-A1); MAGE A3; MAGE A6; legumain; Human papillomavirus (HPV) E6; HPV E7; prostein; survivin; PCTA1 (Galectin 8); Melan-A/MART-1; Ras mutant; TRP-1 (tyrosinase related protein 1, or gp75); Tyrosinase-related Protein 2 (TRP2); TRP-2/INT2 (TRP-2/intron 2); RAGE (renal antigen); receptor for advanced glycation end products 1 (RAGEl); Renal ubiquitous 1, 2 (RU1, RU2); intestinal carboxyl esterase (iCE); Heat shock protein 70-2 (HSP70-2) mutant; thyroid stimulating hormone receptor (TSHR); CD123; CD171; CD19; CD20; CD22; CD26; CD30; CD33; CD44v7/8 (cluster of differentiation 44, exons 7/8); CD53; CD92; CD100; CD148; CD150; CD200; CD261; CD262; CD362; CS-1 (CD2 subset 1, CRACC, SLAMF7, CD319, and 19A24); C-type lectin-like molecule-1 (CLL-1); ganglioside GD3 (aNeu5Ac(2-8)aNeu5Ac(2-3)bDGalp(1-4)bDGlcp(1-1)Cer); Tn antigen (Tn Ag); Fms-Like Tyrosine Kinase 3 (FLT3); CD38; CD138; CD44v6; B7H3 (CD276); KIT (CD 117); Interleukin-13 receptor subunit alpha-2 (IL-13Ra2); Interleukin 11 receptor alpha (IL-11Ra); prostate stem cell antigen (PSCA); Protease Serine 21 (PRSS21); vascular endothelial growth factor receptor 2 (VEGFR2); Lewis(Y) antigen; CD24; Platelet-derived growth factor receptor beta (PDGFR-beta); stage-specific embryonic antigen-4 (SSEA-4); Mucin 1, cell surface associated (MUC1); mucin 16 (MUC16); epidermal growth factor receptor (EGFR); epidermal growth factor receptor variant III (EGFRvIII); neural cell adhesion molecule (NCAM); carbonic anhydrase IX (CAIX); Proteasome (Prosome, Macropain) Subunit, Beta Type, 9 (LMP2); ephrin type-A receptor 2 (EphA2); Ephrin B2; Fucosyl GM1; sialyl Lewis adhesion molecule (sLe); ganglioside GM3 (aNeu5Ac(2-3)bDGalp(1-4)bDGlcp(1-1)Cer); TGS5; high molecular weight-melanoma-associated antigen (HMWMAA); o-acetyl-GD2 ganglioside (OAcGD2); Folate receptor alpha; Folate receptor beta; tumor endothelial marker 1 (TEM1/CD248); tumor endothelial marker 7-related (TEM7R); claudin 6 (CLDN6); G protein-coupled receptor class C group 5, member D (GPRC5D); chromosome X open reading frame 61 (CXORF61); CD97; CD179a; anaplastic lymphoma kinase (ALK); Polysialic acid; placenta-specific 1 (PLAC1); hexasaccharide portion of globoH glycoceramide (GloboH); mammary gland differentiation antigen (NY-BR-1); uroplakin 2 (UPK2); Hepatitis A virus cellular receptor 1 (HAVCR1); adrenoceptor beta 3 (ADRB3); pannexin 3 (PANX3); G protein-coupled receptor 20 (GPR20); lymphocyte antigen 6 complex, locus K 9 (LY6K); Olfactory receptor 51E2 (OR51E2); TCR Gamma Alternate Reading Frame Protein (TARP); Wilms tumor protein (WT1); ETS translocation-variant gene 6, located on chromosome 12p (ETV6-AML); sperm protein 17 (SPA17); X Antigen Family, Member 1A (XAGE1); angiopoietin-binding cell surface receptor 2 (Tie 2); CT (cancer/testis (antigen)); melanoma cancer testis antigen-1 (MAD-CT-1); melanoma cancer testis antigen-2 (MAD-CT-2); Fos-related antigen 1; p53; p53 mutant; human Telomerase reverse transcriptase (hTERT); sarcoma translocation breakpoints; melanoma inhibitor of apoptosis (ML-IAP); ERG (transmembrane protease, serine 2 (TMPRSS2) ETS fusion gene); N-Acetyl glucosaminyl-transferase V (NA17); paired box protein Pax-3 (PAX3); Androgen receptor; Cyclin B1; Cyclin D1; v-myc avian myelocytomatosis viral oncogene neuroblastoma derived homolog (MYCN); Ras Homolog Family Member C (RhoC); Cytochrome P450 1B1 (CYP1B1); CCCTC-Binding Factor (Zinc Finger Protein)-Like (BORIS); Squamous Cell Carcinoma Antigen Recognized By T Cells-1 or 3 (SART1, SART3); Paired box protein Pax-5 (PAX5); proacrosin binding protein sp32 (OY-TES1); lymphocyte-specific protein tyrosine kinase (LCK); A kinase anchor protein 4 (AKAP-4); synovial sarcoma, X breakpoint-1, -2, -3 or -4 (SSX1, SSX2, SSX3, SSX4); CD79a; CD79b; CD72; Leukocyte-associated immunoglobulin-like receptor 1 (LAIR1); Fc fragment of IgA receptor (FCAR); Leukocyte immunoglobulin-like receptor subfamily A member 2 (LILRA2); CD300 molecule-like family member f (CD300LF); C-type lectin domain family 12 member A (CLECi2A); bone marrow stromal cell antigen 2 (BST2); EGF-like module-containing mucin-like hormone receptor-like 2 (EMR2); lymphocyte antigen 75 (LY75); Glypican-3 (GPC3); Fc receptor-like 5 (FCRL5); mouse double minute 2 homolog (MDM2); livin; alphafetoprotein (AFP); transmembrane activator and CAML Interactor (TACI); B-cell activating factor receptor (BAFF-R); V-Ki-ras2 Kirsten rat sarcoma viral oncogene homolog (KRAS); immunoglobulin lambda-like polypeptide 1 (IGLL1); 707-AP (707 alanine proline); ART-4 (adenocarcinoma antigen recognized by T4 cells); BAGE (B antigen; b-catenin/m, b-catenin/mutated); CAMEL (CTL-recognized antigen on melanoma); CAP1 (carcinoembryonic antigen peptide 1); CASP-8 (caspase-8); CDC27m (cell-division cycle 27 mutated); CDK4/m (cycline-dependent kinase 4 mutated); Cyp-B (cyclophilin B); DAM (differentiation antigen melanoma); EGP-2 (epithelial glycoprotein 2); EGP-40 (epithelial glycoprotein 40); Erbb2, 3, 4 (erythroblastic leukemia viral oncogene homolog-2, -3, 4); FBP (folate binding protein); fAchR (Fetal acetylcholine receptor); G250 (glycoprotein 250); GAGE (G antigen); GnT-V (N-acetylglucosaminyltransferase V); HAGE (helicose antigen); ULA-A (human leukocyte antigen-A); HST2 (human signet ring tumor 2); KIAA0205; KDR (kinase insert domain receptor); LDLR/FUT (low density lipid receptor/GDP L-fucose: b-D-galactosidase 2-a-L fucosyltransferase); L1CAM (L1 cell adhesion molecule); MC1R (melanocortin 1 receptor); Myosin/m (myosin mutated); MUM-1, -2, -3 (melanoma ubiquitous mutated 1, 2, 3); NA88-A (NA cDNA clone of patient M88); KG2D (Natural killer group 2, member D) ligands; oncofetal antigen (h5T4); p190 minor bcr-abl (protein of 190KD bcr-abl); Pml/RARa (promyelocytic leukemia/retinoic acid receptor a); PRAME (preferentially expressed antigen of melanoma); SAGE (sarcoma antigen); TEL/AML 1 (translocation Ets-family leukemia/acute myeloid leukemia 1); TPI/m (triosephosphate isomerase mutated); CD70; and any combination thereof.

[0769] In an embodiment, an antigen to be targeted in adoptive cell therapy (such as particularly CAR or TCR T-cell therapy) of a disease (such as particularly of tumor or cancer) is a tumor-specific antigen (TSA).

[0770] In an embodiment, an antigen to be targeted in adoptive cell therapy (such as particularly CAR or TCR T-cell therapy) of a disease (such as particularly of tumor or cancer) is a neoantigen.

[0771] In an embodiment, an antigen to be targeted in adoptive cell therapy (such as particularly CAR or TCR T-cell therapy) of a disease (such as particularly of tumor or cancer) is a tumor-associated antigen (TAA).

[0772] In an embodiment, an antigen to be targeted in adoptive cell therapy (such as particularly CAR or TCR T-cell therapy) of a disease (such as particularly of tumor or cancer) is a universal tumor antigen. In certain preferred embodiments, the universal tumor antigen is selected from the group consisting of: a human telomerase reverse transcriptase (hTERT), survivin, mouse double minute 2 homolog (MDM2), cytochrome P450 1B1 (CYP1B), HER2/neu, Wilms' tumor gene 1 (WT1), livin, alphafetoprotein (AFP), carcinoembryonic antigen (CEA), mucin 16 (MUC16), MUC1, prostate-specific membrane antigen (PSMA), p53, cyclin (Dl), and any combinations thereof.

[0773] In an embodiment, an antigen (such as a tumor antigen) to be targeted in adoptive cell therapy (such as particularly CAR or TCR T-cell therapy) of a disease (such as particularly of tumor or cancer) may be selected from a group consisting of: CD19, BCMA, CD70, CLL-1, MAGE A3, MAGE A6, HPV E6, HPV E7, WT1, CD22, CD171, ROR1, MUC16, and SSX2. In certain preferred embodiments, the antigen may be CD19. For example, CD19 may be targeted in hematologic malignancies, such as in lymphomas, more particularly in B-cell lymphomas, such as without limitation in diffuse large B-cell lymphoma, primary mediastinal b-cell lymphoma, transformed follicular lymphoma, marginal zone lymphoma, mantle cell lymphoma, acute lymphoblastic leukemia including adult and pediatric ALL, non-Hodgkin lymphoma, indolent non-Hodgkin lymphoma, or chronic lymphocytic leukemia. For example, BCMA may be targeted in multiple myeloma or plasma cell leukemia (see, e.g., 2018 American Association for Cancer Research (AACR) Annual meeting Poster: Allogeneic Chimeric Antigen Receptor T Cells Targeting B Cell Maturation Antigen). For example, CLL1 may be targeted in acute myeloid leukemia. For example, MAGE A3, MAGE A6, SSX2, and/or KRAS may be targeted in solid tumors. For example, HPV E6 and/or HPV E7 may be targeted in cervical cancer or head and neck cancer. For example, WT1 may be targeted in acute myeloid leukemia (AML), myelodysplastic syndromes (MDS), chronic myeloid leukemia (CML), non-small cell lung cancer, breast, pancreatic, ovarian or colorectal cancers, or mesothelioma. For example, CD22 may be targeted in B cell malignancies, including non-Hodgkin lymphoma, diffuse large B-cell lymphoma, or acute lymphoblastic leukemia. For example, CD171 may be targeted in neuroblastoma, glioblastoma, or lung, pancreatic, or ovarian cancers. For example, ROR1 may be targeted in ROR1+ malignancies, including non-small cell lung cancer, triple negative breast cancer, pancreatic cancer, prostate cancer, ALL, chronic lymphocytic leukemia, or mantle cell lymphoma. For example, MUC16 may be targeted in MUC16ecto+ epithelial ovarian, fallopian tube or primary peritoneal cancer. For example, CD70 may be targeted in both hematologic malignancies as well as in solid cancers such as renal cell carcinoma (RCC), gliomas (e.g., GBM), and head and neck cancers (HNSCC). CD70 is expressed in both hematologic malignancies as well as in solid cancers, while its expression in normal tissues is restricted to a subset of lymphoid cell types (see, e.g., 2018 American Association for Cancer Research (AACR) Annual meeting Poster: Allogeneic CRISPR Engineered Anti-CD70 CAR-T Cells Demonstrate Potent Preclinical Activity Against Both Solid and Hematological Cancer Cells).

[0774] Various strategies may for example be employed to genetically modify T cells by altering the specificity of the T cell receptor (TCR) for example by introducing new TCR a and R chains with selected peptide specificity (see U.S. Pat. No. 8,697,854; PCT Patent Publications: WO2003020763, WO2004033685, WO2004044004, WO2005114215, WO2006000830, WO2008038002, WO2008039818, WO2004074322, WO2005113595, WO2006125962, WO2013166321, WO2013039889, WO2014018863, WO2014083173; U.S. Pat. No. 8,088,379).

[0775] As an alternative to, or addition to, TCR modifications, chimeric antigen receptors (CARs) may be used in order to generate immunoresponsive cells, such as T cells, specific for selected targets, such as malignant cells, with a wide variety of receptor chimera constructs having been described (see U.S. Pat. Nos. 5,843,728; 5,851,828; 5,912,170; 6,004,811; 6,284,240; 6,392,013; 6,410,014; 6,753,162; 8,211,422; and, PCT Publication WO 9215322).

[0776] In general, CARs are comprised of an extracellular domain, a transmembrane domain, and an intracellular domain, wherein the extracellular domain comprises an antigen-binding domain that is specific for a predetermined target. While the antigen-binding domain of a CAR is often an antibody or antibody fragment (e.g., a single chain variable fragment, scFv), the binding domain is not particularly limited so long as it results in specific recognition of a target. For example, In one embodiment, the antigen-binding domain may comprise a receptor, such that the CAR is capable of binding to the ligand of the receptor. Alternatively, the antigen-binding domain may comprise a ligand, such that the CAR is capable of binding the endogenous receptor of that ligand.

[0777] The antigen-binding domain of a CAR is generally separated from the transmembrane domain by a hinge or spacer. The spacer is also not particularly limited, and it is designed to provide the CAR with flexibility. For example, a spacer domain may comprise a portion of a human Fc domain, including a portion of the CH3 domain, or the hinge region of any immunoglobulin, such as IgA, IgD, IgE, IgG, or IgM, or variants thereof. Furthermore, the hinge region may be modified so as to prevent off-target binding by FcRs or other potential interfering objects. For example, the hinge may comprise an IgG4 Fc domain with or without a S228P, L235E, and/or N297Q mutation (according to Kabat numbering) in order to decrease binding to FcRs. Additional spacers/hinges include, but are not limited to, CD4, CD8, and CD28 hinge regions.

[0778] The transmembrane domain of a CAR may be derived either from a natural or from a synthetic source. Where the source is natural, the domain may be derived from any membrane bound or transmembrane protein. Transmembrane regions of particular use in this disclosure may be derived from CD8, CD28, CD3, CD45, CD4, CD5, CDS, CD9, CD 16, CD22, CD33, CD37, CD64, CD80, CD86, CD 134, CD137, CD 154, TCR. Alternatively, the transmembrane domain may be synthetic, in which case it will comprise predominantly hydrophobic residues such as leucine and valine. Preferably a triplet of phenylalanine, tryptophan and valine will be found at each end of a synthetic transmembrane domain. Optionally, a short oligo- or polypeptide linker, preferably between 2 and 10 amino acids in length may form the linkage between the transmembrane domain and the cytoplasmic signaling domain of the CAR. A glycine-serine doublet provides a particularly suitable linker.

[0779] Alternative CAR constructs may be characterized as belonging to successive generations. First-generation CARs typically consist of a single-chain variable fragment of an antibody specific for an antigen, for example comprising a VL linked to a VH of a specific antibody, linked by a flexible linker, for example by a CD8a hinge domain and a CD8a transmembrane domain, to the transmembrane and intracellular signaling domains of either CD3ζ or FcRγ (scFv-CD3ζ or scFv-FcRγ; see U.S. Pat. Nos. 7,741,465; 5,912,172; 5,906,936). Second-generation CARs incorporate the intracellular domains of one or more costimulatory molecules, such as CD28, OX40 (CD134), or 4-1BB (CD137) within the endodomain (for example scFv-CD28/OX40/4-1BB-CD3ζ; see U.S. Pat. Nos. 8,911,993; 8,916,381; 8,975,071; 9,101,584; 9,102,760; 9,102,761). Third-generation CARs include a combination of costimulatory endodomains, such a CD3ζ-chain, CD97, GDI la-CD18, CD2, ICOS, CD27, CD154, CDS, OX40, 4-1BB, CD2, CD7, LIGHT, LFA-1, NKG2C, B7-H3, CD30, CD40, PD-1, or CD28 signaling domains (for example scFv-CD28-4-1BB-CD3ζ or scFv-CD28-OX40-CD3ζ; see U.S. Pat. Nos. 8,906,682; 8,399,645; 5,686,281; PCT Publication No. WO 2014/134165; PCT Publication No. WO 2012/079000). In an embodiment, the primary signaling domain comprises a functional signaling domain of a protein selected from the group consisting of CD3 zeta, CD3 gamma, CD3 delta, CD3 epsilon, common FcR gamma (FCERIG), FcR beta (Fc Epsilon Rib), CD79a, CD79b, Fc gamma RIIa, DAP10, and DAP12. In certain preferred embodiments, the primary signaling domain comprises a functional signaling domain of CD3ζ or FcRγ. In an embodiment, the one or more costimulatory signaling domains comprise a functional signaling domain of a protein selected, each independently, from the group consisting of: CD27, CD28, 4-1BB (CD137), OX40, CD30, CD40, PD-1, ICOS, lymphocyte function-associated antigen-1 (LFA-1), CD2, CD7, LIGHT, NKG2C, B7-H3, a ligand that specifically binds with CD83, CDS, ICAM-1, GITR, BAFFR, HVEM (LIGHTR), SLAMF7, NKp80 (KLRF1), CD160, CD19, CD4, CD8 alpha, CD8 beta, IL2R beta, IL2R gamma, IL7R alpha, ITGA4, VLA1, CD49a, ITGA4, IA4, CD49D, ITGA6, VLA-6, CD49f, ITGAD, CD11d, ITGAE, CD103, ITGAL, CD11a, LFA-1, ITGAM, CD11b, ITGAX, CD11c, ITGB1, CD29, ITGB2, CD18, ITGB7, TNFR2, TRANCE/RANKL, DNAM1 (CD226), SLAMF4 (CD244, 2B4), CD84, CD96 (Tactile), CEACAM1, CRTAM, Ly9 (CD229), CD160 (BY55), PSGL1, CD100 (SEMA4D), CD69, SLAMF6 (NTB-A, Lyl08), SLAM (SLAMF1, CD150, IPO-3), BLAME (SLAMF8), SELPLG (CD162), LTBR, LAT, GADS, SLP-76, PAG/Cbp, NKp44, NKp30, NKp46, and NKG2D. In an embodiment, the one or more costimulatory signaling domains comprise a functional signaling domain of a protein selected, each independently, from the group consisting of: 4-1BB, CD27, and CD28. In an embodiment, a chimeric antigen receptor may have the design as described in U.S. Pat. No. 7,446,190, comprising an intracellular domain of CD3ζ chain (such as amino acid residues 52-163 of the human CD3 zeta chain, as shown in SEQ ID NO: 14 of U.S. Pat. No. 7,446,190), a signaling region from CD28 and an antigen-binding element (or portion or domain; such as scFv). The CD28 portion, when between the zeta chain portion and the antigen-binding element, may suitably include the transmembrane and signaling domains of CD28 (such as amino acid residues 114-220 of SEQ ID NO: 10, full sequence shown in SEQ ID NO: 6 of U.S. Pat. No. 7,446,190; these can include the following portion of CD28 as set forth in Genbank identifier NM_006139. Alternatively, when the zeta sequence lies between the CD28 sequence and the antigen-binding element, intracellular domain of CD28 can be used alone (such as amino sequence set forth in SEQ ID NO: 9 of U.S. Pat. No. 7,446,190). Hence, an embodiment employ a CAR comprising (a) a zeta chain portion comprising the intracellular domain of human CD3ζ chain, (b) a costimulatory signaling region, and (c) an antigen-binding element (or portion or domain), wherein the costimulatory signaling region comprises the amino acid sequence encoded by SEQ ID NO: 6 of U.S. Pat. No. 7,446,190.

[0780] Alternatively, costimulation may be orchestrated by expressing CARs in antigen-specific T cells, chosen so as to be activated and expanded following engagement of their native αβTCR, for example by antigen on professional antigen-presenting cells, with attendant costimulation. In addition, additional engineered receptors may be provided on the immunoresponsive cells, for example to improve targeting of a T-cell attack and/or minimize side effects.

[0781] By means of an example and without limitation, Kochenderfer et al., (2009) J Immunother. 32 (7): 689-702 described anti-CD19 chimeric antigen receptors (CAR). FMC63-28Z CAR contained a single chain variable region moiety (scFv) recognizing CD19 derived from the FMC63 mouse hybridoma (described in Nicholson et al., (1997) Molecular Immunology 34: 1157-1165), a portion of the human CD28 molecule, and the intracellular component of the human TCR-(molecule. FMC63-CD828BBZ CAR contained the FMC63 scFv, the hinge and transmembrane regions of the CD8 molecule, the cytoplasmic portions of CD28 and 4-1BB, and the cytoplasmic component of the TCR-(molecule. The exact sequence of the CD28 molecule included in the FMC63-28Z CAR corresponded to Genbank identifier NM_006139; the sequence included all amino acids starting with the amino acid sequence IEVMYPPPY (SEQ ID NO: 2058) and continuing all the way to the carboxy-terminus of the protein. To encode the anti-CD19 scFv component of the vector, the authors designed a DNA sequence which was based on a portion of a previously published CAR (Cooper et al., (2003) Blood 101: 1637-1644). This sequence encoded the following components in frame from the 5′ end to the 3′ end: an XhoI site, the human granulocyte-macrophage colony-stimulating factor (GM-CSF) receptor α-chain signal sequence, the FMC63 light chain variable region (as in Nicholson et al., supra), a linker peptide (as in Cooper et al., supra), the FMC63 heavy chain variable region (as in Nicholson et al., supra), and a NotI site. A plasmid encoding this sequence was digested with XhoI and NotI. To form the MSGV-FMC63-28Z retroviral vector, the XhoI and NotI-digested fragment encoding the FMC63 scFv was ligated into a second XhoI and NotI-digested fragment that encoded the MSGV retroviral backbone (as in Hughes et al., (2005) Human Gene Therapy 16: 457-472) as well as part of the extracellular portion of human CD28, the entire transmembrane and cytoplasmic portion of human CD28, and the cytoplasmic portion of the human TCR-(molecule (as in Maher et al., 2002) Nature Biotechnology 20: 70-75). The FMC63-28Z CAR is included in the KTE-C19 (axicabtagene ciloleucel) anti-CD19 CAR-T therapy product in development by Kite Pharma, Inc. for the treatment of inter alia patients with relapsed/refractory aggressive B-cell non-Hodgkin lymphoma (NHL). Accordingly, in an embodiment, cells intended for adoptive cell therapies, more particularly immunoresponsive cells such as T cells, may express the FMC63-28Z CAR as described by Kochenderfer et al. (supra). Hence, in an embodiment, cells intended for adoptive cell therapies, more particularly immunoresponsive cells such as T cells, may comprise a CAR comprising an extracellular antigen-binding element (or portion or domain; such as scFv) that specifically binds to an antigen, an intracellular signaling domain comprising an intracellular domain of a CD3ζ chain, and a costimulatory signaling region comprising a signaling domain of CD28. Preferably, the CD28 amino acid sequence is as set forth in Genbank identifier NM_006139 (sequence version 1, 2 or 3) starting with the amino acid sequence IEVMYPPPY and continuing all the way to the carboxy-terminus of the protein. Preferably, the antigen is CD19, more preferably the antigen-binding element is an anti-CD19 scFv, even more preferably the anti-CD19 scFv as described by Kochenderfer et al. (supra).

[0782] Additional anti-CD19 CARs are further described in International Patent Publication No. WO 2015/187528. More particularly Example 1 and Table 1 of WO2015187528, incorporated by reference herein, demonstrate the generation of anti-CD19 CARs based on a fully human anti-CD19 monoclonal antibody (47G4, as described in US20100104509) and murine anti-CD19 monoclonal antibody (as described in Nicholson et al. and explained above). Various combinations of a signal sequence (human CD8-alpha or GM-CSF receptor), extracellular and transmembrane regions (human CD8-alpha) and intracellular T-cell signaling domains (CD28-CD3ζ; 4-1BB-CD3ζ; CD27-CD3ζ; CD28-CD27-CD3ζ, 4-1BB-CD27-CD3ζ; CD27-4-1BB-CD3ζ; CD28-CD27-Fc RI gamma chain; or CD28-Fc RI gamma chain) were disclosed. Hence, in an embodiment, cells intended for adoptive cell therapies, more particularly immunoresponsive cells such as T cells, may comprise a CAR comprising an extracellular antigen-binding element that specifically binds to an antigen, an extracellular and transmembrane region as set forth in Table 1 of WO2015187528 and an intracellular T-cell signaling domain as set forth in Table 1 of No. WO 2015/187528. Preferably, the antigen is CD19, more preferably the antigen-binding element is an anti-CD19 scFv, even more preferably the mouse or human anti-CD19 scFv as described in Example 1 of WO 2015/187528. In an embodiment, the CAR comprises, consists essentially of or consists of an amino acid sequence of SEQ ID NO: 1, SEQ ID NO: 2, SEQ ID NO: 3, SEQ ID NO: 4, SEQ ID NO: 5, SEQ ID NO: 6, SEQ ID NO: 7, SEQ ID NO: 8, SEQ ID NO: 9, SEQ ID NO: 10, SEQ ID NO: 11, SEQ ID NO: 12, or SEQ ID NO: 13 as set forth in Table 1 of WO2015187528.

[0783] By means of an example and without limitation, chimeric antigen receptor that recognizes the CD70 antigen is described in WO2012058460A2 (see also, Park et al., CD70 as a target for chimeric antigen receptor T cells in head and neck squamous cell carcinoma, Oral Oncol. 2018 March; 78:145-150; and Jin et al., CD70, a novel target of CAR T-cell therapy for gliomas, Neuro Oncol. 2018 Jan. 10; 20(1):55-65). CD70 is expressed by diffuse large B-cell and follicular lymphoma and also by the malignant cells of Hodgkins lymphoma, Waldenstrom's macroglobulinemia and multiple myeloma, and by HTLV-1- and EBV-associated malignancies. (Agathanggelou et al. Am. J. Pathol. 1995; 147: 1152-1160; Hunter et al., Blood 2004; 104:4881. 26; Lens et al., J Immunol. 2005; 174:6212-6219; Baba et al., J Virol. 2008; 82:3843-3852.) In addition, CD70 is expressed by non-hematological malignancies such as renal cell carcinoma and glioblastoma. (Junker et al., J Urol. 2005; 173:2150-2153; Chahlavi et al., Cancer Res 2005; 65:5428-5438) Physiologically, CD70 expression is transient and restricted to a subset of highly activated T, B, and dendritic cells.

[0784] By means of an example and without limitation, chimeric antigen receptor that recognizes BCMA has been described (see, e.g., US20160046724A1; WO2016014789A2; WO2017211900A1; WO2015158671A1; US20180085444A1; WO2018028647A1; US20170283504A1; and WO2013154760A1).

[0785] In an embodiment, the immune cell may, in addition to a CAR or exogenous TCR as described herein, further comprise a chimeric inhibitory receptor (inhibitory CAR) that specifically binds to a second target antigen and is capable of inducing an inhibitory or immunosuppressive or repressive signal to the cell upon recognition of the second target antigen. In an embodiment, the chimeric inhibitory receptor comprises an extracellular antigen-binding element (or portion or domain) configured to specifically bind to a target antigen, a transmembrane domain, and an intracellular immunosuppressive or repressive signaling domain. In an embodiment, the second target antigen is an antigen that is not expressed on the surface of a cancer cell or infected cell or the expression of which is downregulated on a cancer cell or an infected cell. In an embodiment, the second target antigen is an MHC-class I molecule. In an embodiment, the intracellular signaling domain comprises a functional signaling portion of an immune checkpoint molecule, such as for example PD-I or CTLA4. Advantageously, the inclusion of such inhibitory CAR reduces the chance of the engineered immune cells attacking non-target (e.g., non-cancer) tissues.

[0786] Alternatively, T-cells expressing CARs may be further modified to reduce or eliminate expression of endogenous TCRs in order to reduce off-target effects. Reduction or elimination of endogenous TCRs can reduce off-target effects and increase the effectiveness of the T cells (U.S. Pat. No. 9,181,527). T cells stably lacking expression of a functional TCR may be produced using a variety of approaches. T cells internalize, sort, and degrade the entire T cell receptor as a complex, with a half-life of about 10 hours in resting T cells and 3 hours in stimulated T cells (von Essen, M. et al. 2004. J. Immunol. 173:384-393). Proper functioning of the TCR complex requires the proper stoichiometric ratio of the proteins that compose the TCR complex. TCR function also requires two functioning TCR zeta proteins with ITAM motifs. The activation of the TCR upon engagement of its MHC-peptide ligand requires the engagement of several TCRs on the same T cell, which all must signal properly. Thus, if a TCR complex is destabilized with proteins that do not associate properly or cannot signal optimally, the T cell will not become activated sufficiently to begin a cellular response.

[0787] Accordingly, In one embodiment, TCR expression may eliminated using RNA interference (e.g., shRNA, siRNA, miRNA, etc.), IscB polypeptide or CRISPR-associated IscB polypeptide nuclease, or other methods that target the nucleic acids encoding specific TCRs (e.g., TCR-α and TCR-β) and/or CD3 chains in primary T cells. By blocking expression of one or more of these proteins, the T cell will no longer produce one or more of the key components of the TCR complex, thereby destabilizing the TCR complex and preventing cell surface expression of a functional TCR.

[0788] In some instances, CAR may also comprise a switch mechanism for controlling expression and/or activation of the CAR. For example, a CAR may comprise an extracellular, transmembrane, and intracellular domain, in which the extracellular domain comprises a target-specific binding element that comprises a label, binding domain, or tag that is specific for a molecule other than the target antigen that is expressed on or by a target cell. In such embodiments, the specificity of the CAR is provided by a second construct that comprises a target antigen binding domain (e.g., an scFv or a bispecific antibody that is specific for both the target antigen and the label or tag on the CAR) and a domain that is recognized by or binds to the label, binding domain, or tag on the CAR. See, e.g., WO 2013/044225, WO 2016/000304, WO 2015/057834, WO 2015/057852, WO 2016/070061, U.S. Pat. No. 9,233,125, US 2016/0129109. In this way, a T-cell that expresses the CAR can be administered to a subject, but the CAR cannot bind its target antigen until the second composition comprising an antigen-specific binding domain is administered.

[0789] Alternative switch mechanisms include CARs that require multimerization in order to activate their signaling function (see, e.g., US Patent Publication Nos. US 2015/0368342, US 2016/0175359, US 2015/0368360) and/or an exogenous signal, such as a small molecule drug (US 2016/0166613, Yung et al., Science, 2015), in order to elicit a T-cell response. Some CARs may also comprise a “suicide switch” to induce cell death of the CAR T-cells following treatment (Buddee et al., PLoS One, 2013) or to downregulate expression of the CAR following binding to the target antigen (International Patent Publication No. WO 2016/011210).

[0790] Alternative techniques may be used to transform target immunoresponsive cells, such as protoplast fusion, lipofection, transfection or electroporation. A wide variety of vectors may be used, such as retroviral vectors, lentiviral vectors, adenoviral vectors, adeno-associated viral vectors, plasmids or transposons, such as a Sleeping Beauty transposon (see U.S. Pat. Nos. 6,489,458; 7,148,203; 7,160,682; 7,985,739; 8,227,432), may be used to introduce CARs, for example using 2nd generation antigen-specific CARs signaling through CD3ζ and either CD28 or CD137. Viral vectors may for example include vectors based on HIV, SV40, EBV, HSV or BPV.

[0791] Cells that are targeted for transformation may for example include T cells, Natural Killer (NK) cells, cytotoxic T lymphocytes (CTL), regulatory T cells, human embryonic stem cells, tumor-infiltrating lymphocytes (TIL) or a pluripotent stem cell from which lymphoid cells may be differentiated. T cells expressing a desired CAR may for example be selected through co-culture with γ-irradiated activating and propagating cells (AaPC), which co-express the cancer antigen and co-stimulatory molecules. The engineered CAR T-cells may be expanded, for example by co-culture on AaPC in presence of soluble factors, such as IL-2 and IL-21. This expansion may for example be carried out so as to provide memory CAR+ T cells (which may for example be assayed by non-enzymatic digital array and/or multi-panel flow cytometry). In this way, CAR T cells may be provided that have specific cytotoxic activity against antigen-bearing tumors (optionally in conjunction with production of desired chemokines such as interferon-γ). CAR T cells of this kind may for example be used in animal models, for example to treat tumor xenografts.

[0792] In an embodiment, ACT includes co-transferring CD4+ Th1 cells and CD8+ CTLs to induce a synergistic antitumor response (see, e.g., Li et al., Adoptive cell therapy with CD4+T helper 1 cells and CD8+ cytotoxic T cells enhances complete rejection of an established tumor, leading to generation of endogenous memory responses to non-targeted tumor epitopes. Clin Transl Immunology. 2017 October; 6(10): e160).

[0793] In an embodiment, Th17 cells are transferred to a subject in need thereof. Th17 cells have been reported to directly eradicate melanoma tumors in mice to a greater extent than Th1 cells (Muranski P, et al., Tumor-specific Th17-polarized cells eradicate large established melanoma. Blood. 2008 Jul. 15; 112(2):362-73; and Martin-Orozco N, et al., T helper 17 cells promote cytotoxic T cell activation in tumor immunity. Immunity. 2009 Nov. 20; 31(5):787-98). Those studies involved an adoptive T cell transfer (ACT) therapy approach, which takes advantage of CD4+ T cells that express a TCR recognizing tyrosinase tumor antigen. Exploitation of the TCR leads to rapid expansion of Th17 populations to large numbers ex vivo for reinfusion into the autologous tumor-bearing hosts.

[0794] In an embodiment, ACT may include autologous iPSC-based vaccines, such as irradiated iPSCs in autologous anti-tumor vaccines (see e.g., Kooreman, Nigel G. et al., Autologous iPSC-Based Vaccines Elicit Anti-tumor Responses In Vivo, Cell Stem Cell 22, 1-13, 2018, doi.org/10.1016/j.stem.2018.01.016).

[0795] Unlike T-cell receptors (TCRs) that are MHC restricted, CARs can potentially bind any cell surface-expressed antigen and can thus be more universally used to treat patients (see Irving et al., Engineering Chimeric Antigen Receptor T-Cells for Racing in Solid Tumors: Don't Forget the Fuel, Front. Immunol., 3 Apr. 2017, doi.org/10.3389/fimmu.2017.00267). In an embodiment, in the absence of endogenous T-cell infiltrate (e.g., due to aberrant antigen processing and presentation), which precludes the use of TIL therapy and immune checkpoint blockade, the transfer of CAR T-cells may be used to treat patients (see, e.g., Hinrichs C S, Rosenberg S A. Exploiting the curative potential of adoptive T-cell therapy for cancer. Immunol Rev (2014) 257(1):56-71. doi:10.1111/imr.12132).

[0796] Approaches such as the foregoing may be adapted to provide methods of treating and/or increasing survival of a subject having a disease, such as a neoplasia, for example by administering an effective amount of an immunoresponsive cell comprising an antigen recognizing receptor that binds a selected antigen, wherein the binding activates the immunoresponsive cell, thereby treating or preventing the disease (such as a neoplasia, a pathogen infection, an autoimmune disorder, or an allogeneic transplant reaction).

[0797] In an embodiment, the treatment can be administered after lymphodepleting pretreatment in the form of chemotherapy (typically a combination of cyclophosphamide and fludarabine) or radiation therapy. Initial studies in ACT had short lived responses and the transferred cells did not persist in vivo for very long (Houot et al., T-cell-based immunotherapy: adoptive cell transfer and checkpoint inhibition. Cancer Immunol Res (2015) 3(10):1115-22; and Kamta et al., Advancing Cancer Therapy with Present and Emerging Immuno-Oncology Approaches. Front. Oncol. (2017) 7:64). Immune suppressor cells like Tregs and MDSCs may attenuate the activity of transferred cells by outcompeting them for the necessary cytokines. Not being bound by a theory lymphodepleting pretreatment may eliminate the suppressor cells allowing the TILs to persist.

[0798] In one embodiment, the treatment can be administrated into patients undergoing an immunosuppressive treatment (e.g., glucocorticoid treatment). The cells or population of cells, may be made resistant to at least one immunosuppressive agent due to the inactivation of a gene encoding a receptor for such immunosuppressive agent. In an embodiment, the immunosuppressive treatment provides for the selection and expansion of the immunoresponsive T cells within the patient.

[0799] In an embodiment, the treatment can be administered before primary treatment (e.g., surgery or radiation therapy) to shrink a tumor before the primary treatment. In another embodiment, the treatment can be administered after primary treatment to remove any remaining cancer cells.

[0800] In an embodiment, immunometabolic barriers can be targeted therapeutically prior to and/or during ACT to enhance responses to ACT or CAR T-cell therapy and to support endogenous immunity (see, e.g., Irving et al., Engineering Chimeric Antigen Receptor T-Cells for Racing in Solid Tumors: Don't Forget the Fuel, Front. Immunol., 3 Apr. 2017, doi.org/10.3389/fimmu.2017.00267).

[0801] The administration of cells or population of cells, such as immune system cells or cell populations, such as more particularly immunoresponsive cells or cell populations, as disclosed herein may be carried out in any convenient manner, including by aerosol inhalation, injection, ingestion, transfusion, implantation or transplantation. The cells or population of cells may be administered to a patient subcutaneously, intradermally, intratumorally, intranodally, intramedullary, intramuscularly, intrathecally, by intravenous or intralymphatic injection, or intraperitoneally. In one embodiment, the disclosed CARs may be delivered or administered into a cavity formed by the resection of tumor tissue (i.e. intracavity delivery) or directly into a tumor prior to resection (i.e. intratumoral delivery). In one embodiment, the cell compositions of the present invention are preferably administered by intravenous injection.

[0802] The administration of the cells or population of cells can consist of the administration of 104-109 cells per kg body weight, preferably 105 to 106 cells/kg body weight including all integer values of cell numbers within those ranges. Dosing in CAR T cell therapies may for example involve administration of from 106 to 109 cells/kg, with or without a course of lymphodepletion, for example with cyclophosphamide. The cells or population of cells can be administrated in one or more doses. In another embodiment, the effective amount of cells are administrated as a single dose. In another embodiment, the effective amount of cells are administrated as more than one dose over a period time. Timing of administration is within the judgment of managing physician and depends on the clinical condition of the patient. The cells or population of cells may be obtained from any source, such as a blood bank or a donor. While individual needs vary, determination of optimal ranges of effective amounts of a given cell type for a particular disease or conditions are within the skill of one in the art. An effective amount means an amount which provides a therapeutic or prophylactic benefit. The dosage administrated will be dependent upon the age, health and weight of the recipient, kind of concurrent treatment, if any, frequency of treatment and the nature of the effect desired.

[0803] In another embodiment, the effective amount of cells or composition comprising those cells are administrated parenterally. The administration can be an intravenous administration. The administration can be directly done by injection within a tumor.

[0804] To guard against possible adverse reactions, engineered immunoresponsive cells may be equipped with a transgenic safety switch, in the form of a transgene that renders the cells vulnerable to exposure to a specific signal. For example, the herpes simplex viral thymidine kinase (TK) gene may be used in this way, for example by introduction into allogeneic T lymphocytes used as donor lymphocyte infusions following stem cell transplantation (Greco, et al., Improving the safety of cell therapy with the TK-suicide gene. Front. Pharmacol. 2015; 6: 95). In such cells, administration of a nucleoside prodrug such as ganciclovir or acyclovir causes cell death. Alternative safety switch constructs include inducible caspase 9, for example triggered by administration of a small-molecule dimerizer that brings together two nonfunctional icasp9 molecules to form the active enzyme. A wide variety of alternative approaches to implementing cellular proliferation controls have been described (see U.S. Patent Publication No. 20130071414; International Patent Publication WO 2011/146862; International Patent Publication WO 2014/011987; International Patent Publication WO 2013/040371; Zhou et al. BLOOD, 2014, 123/25:3895-3905; Di Stasi et al., The New England Journal of Medicine 2011; 365:1673-1683; Sadelain M, The New England Journal of Medicine 2011; 365:1735-173; Ramos et al., Stem Cells 28(6):1107-15 (2010)).

[0805] In a further refinement of adoptive therapies, genome editing may be used to tailor immunoresponsive cells to alternative implementations, for example providing edited CAR T cells (see Poirot et al., 2015, Multiplex genome edited T-cell manufacturing platform for “off-the-shelf” adoptive T-cell immunotherapies, Cancer Res 75 (18): 3853; Ren et al., 2017, Multiplex genome editing to generate universal CAR T cells resistant to PD1 inhibition, Clin Cancer Res. 2017 May 1; 23(9):2255-2266. doi: 10.1158/1078-0432.CCR-16-1300. Epub 2016 Nov. 4; Qasim et al., 2017, Molecular remission of infant B-ALL after infusion of universal TALEN gene-edited CAR T cells, Sci Transl Med. 2017 Jan. 25; 9(374); Legut, et al., 2018, CRISPR-mediated TCR replacement generates superior anticancer transgenic T cells. Blood, 131(3), 311-322; and Georgiadis et al., Long Terminal Repeat CRISPR-CAR-Coupled “Universal” T Cells Mediate Potent Anti-leukemic Effects, Molecular Therapy, In Press, Corrected Proof, Available online 6 Mar. 2018). Cells may be edited using any CRISPR system and method of use thereof as described herein. The composition and systems may be delivered to an immune cell by any method described herein. In preferred embodiments, cells are edited ex vivo and transferred to a subject in need thereof. Immunoresponsive cells, CAR T cells or any cells used for adoptive cell transfer may be edited. Editing may be performed for example to insert or knock-in an exogenous gene, such as an exogenous gene encoding a CAR or a TCR, at a preselected locus in a cell (e.g. TRAC locus); to eliminate potential alloreactive T-cell receptors (TCR) or to prevent inappropriate pairing between endogenous and exogenous TCR chains, such as to knock-out or knock-down expression of an endogenous TCR in a cell; to disrupt the target of a chemotherapeutic agent in a cell; to block an immune checkpoint, such as to knock-out or knock-down expression of an immune checkpoint protein or receptor in a cell; to knock-out or knock-down expression of other gene or genes in a cell, the reduced expression or lack of expression of which can enhance the efficacy of adoptive therapies using the cell; to knock-out or knock-down expression of an endogenous gene in a cell, said endogenous gene encoding an antigen targeted by an exogenous CAR or TCR; to knock-out or knock-down expression of one or more MHC constituent proteins in a cell; to activate a T cell; to modulate cells such that the cells are resistant to exhaustion or dysfunction; and/or increase the differentiation and/or proliferation of functionally exhausted or dysfunctional CD8+ T-cells (see International Patent Publication Nos. WO 2013/176915, WO 2014/059173, WO 2014/172606, WO 2014/184744, and WO 2014/191128).

[0806] In an embodiment, editing may result in inactivation of a gene. By inactivating a gene, it is intended that the gene of interest is not expressed in a functional protein form. In a particular embodiment, the system specifically catalyzes cleavage in one targeted gene thereby inactivating said targeted gene. The nucleic acid strand breaks caused are commonly repaired through the distinct mechanisms of homologous recombination or non-homologous end joining (NHEJ). However, NHEJ is an imperfect repair process that often results in changes to the DNA sequence at the site of the cleavage. Repair via non-homologous end joining (NHEJ) often results in small insertions or deletions (Indel) and can be used for the creation of specific gene knockouts. Cells in which a cleavage induced mutagenesis event has occurred can be identified and/or selected by well-known methods in the art. In an embodiment, homology directed repair (HDR) is used to concurrently inactivate a gene (e.g., TRAC) and insert an endogenous TCR or CAR into the inactivated locus.

[0807] Hence, in an embodiment, editing of cells, particularly cells intended for adoptive cell therapies, more particularly immunoresponsive cells such as T cells, may be performed to insert or knock-in an exogenous gene, such as an exogenous gene encoding a CAR or a TCR, at a preselected locus in a cell. Conventionally, nucleic acid molecules encoding CARs or TCRs are transfected or transduced to cells using randomly integrating vectors, which, depending on the site of integration, may lead to clonal expansion, oncogenic transformation, variegated transgene expression and/or transcriptional silencing of the transgene. Directing of transgene(s) to a specific locus in a cell can minimize or avoid such risks and advantageously provide for uniform expression of the transgene(s) by the cells. Without limitation, suitable ‘safe harbor’ loci for directed transgene integration include CCR5 or AAVS1. Homology-directed repair (HDR) strategies are known and described elsewhere in this specification allowing to insert transgenes into desired loci (e.g., TRAC locus).

[0808] Further suitable loci for insertion of transgenes, in particular CAR or exogenous TCR transgenes, include without limitation loci comprising genes coding for constituents of endogenous T-cell receptor, such as T-cell receptor alpha locus (TRA) or T-cell receptor beta locus (TRB), for example T-cell receptor alpha constant (TRAC) locus, T-cell receptor beta constant 1 (TRBC1) locus or T-cell receptor beta constant 2 (TRBC1) locus. Advantageously, insertion of a transgene into such locus can simultaneously achieve expression of the transgene, potentially controlled by the endogenous promoter, and knock-out expression of the endogenous TCR. This approach has been exemplified in Eyquem et al., (2017) Nature 543: 113-117, wherein the authors used CRISPR/Cas9 gene editing to knock-in a DNA molecule encoding a CD19-specific CAR into the TRAC locus downstream of the endogenous promoter; the CAR-T cells obtained by CRISPR were significantly superior in terms of reduced tonic CAR signaling and exhaustion.

[0809] T cell receptors (TCR) are cell surface receptors that participate in the activation of T cells in response to the presentation of antigen. The TCR is generally made from two chains, a and p, which assemble to form a heterodimer and associates with the CD3-transducing subunits to form the T cell receptor complex present on the cell surface. Each a and p chain of the TCR consists of an immunoglobulin-like N-terminal variable (V) and constant (C) region, a hydrophobic transmembrane domain, and a short cytoplasmic region. As for immunoglobulin molecules, the variable region of the a and p chains are generated by V(D)J recombination, creating a large diversity of antigen specificities within the population of T cells. However, in contrast to immunoglobulins that recognize intact antigen, T cells are activated by processed peptide fragments in association with an MHC molecule, introducing an extra dimension to antigen recognition by T cells, known as MHC restriction. Recognition of MHC disparities between the donor and recipient through the T cell receptor leads to T cell proliferation and the potential development of graft versus host disease (GVHD). The inactivation of TCRα or TCRβ can result in the elimination of the TCR from the surface of T cells preventing recognition of alloantigen and thus GVHD. However, TCR disruption generally results in the elimination of the CD3 signaling component and alters the means of further T cell expansion.

[0810] Hence, in an embodiment, editing of cells, particularly cells intended for adoptive cell therapies, more particularly immunoresponsive cells such as T cells, may be performed to knock-out or knock-down expression of an endogenous TCR in a cell. For example, NHEJ-based or HDR-based gene editing approaches can be employed to disrupt the endogenous TCR alpha and/or beta chain genes. For example, gene editing system or systems, such as IscB system or systems, can be designed to target a sequence found within the TCR beta chain conserved between the beta 1 and beta 2 constant region genes (TRBC1 and TRBC2) and/or to target the constant region of the TCR alpha chain (TRAC) gene.

[0811] Allogeneic cells are rapidly rejected by the host immune system. It has been demonstrated that, allogeneic leukocytes present in non-irradiated blood products will persist for no more than 5 to 6 days (Boni, Muranski et al. 2008 Blood 1; 112(12):4746-54). Thus, to prevent rejection of allogeneic cells, the host's immune system usually has to be suppressed to some extent. However, in the case of adoptive cell transfer the use of immunosuppressive drugs also have a detrimental effect on the introduced therapeutic T cells. Therefore, to effectively use an adoptive immunotherapy approach in these conditions, the introduced cells would need to be resistant to the immunosuppressive treatment. Thus, in a particular embodiment, the present invention further comprises a step of modifying T cells to make them resistant to an immunosuppressive agent, preferably by inactivating at least one gene encoding a target for an immunosuppressive agent. An immunosuppressive agent is an agent that suppresses immune function by one of several mechanisms of action. An immunosuppressive agent can be, but is not limited to a calcineurin inhibitor, a target of rapamycin, an interleukin-2 receptor α-chain blocker, an inhibitor of inosine monophosphate dehydrogenase, an inhibitor of dihydrofolic acid reductase, a corticosteroid or an immunosuppressive antimetabolite. The present invention allows conferring immunosuppressive resistance to T cells for immunotherapy by inactivating the target of the immunosuppressive agent in T cells. As non-limiting examples, targets for an immunosuppressive agent can be a receptor for an immunosuppressive agent such as: CD52, glucocorticoid receptor (GR), a FKBP family gene member and a cyclophilin family gene member.

[0812] In an embodiment, editing of cells, particularly cells intended for adoptive cell therapies, more particularly immunoresponsive cells such as T cells, may be performed to block an immune checkpoint, such as to knock-out or knock-down expression of an immune checkpoint protein or receptor in a cell. Immune checkpoints are inhibitory pathways that slow down or stop immune reactions and prevent excessive tissue damage from uncontrolled activity of immune cells. In an embodiment, the immune checkpoint targeted is the programmed death-1 (PD-1 or CD279) gene (PDCD1). In other embodiments, the immune checkpoint targeted is cytotoxic T-lymphocyte-associated antigen (CTLA-4). In additional embodiments, the immune checkpoint targeted is another member of the CD28 and CTLA4 Ig superfamily such as BTLA, LAG3, ICOS, PDL1 or KIR. In further additional embodiments, the immune checkpoint targeted is a member of the TNFR superfamily such as CD40, OX40, CD137, GITR, CD27 or TIM-3.

[0813] Additional immune checkpoints include Src homology 2 domain-containing protein tyrosine phosphatase 1 (SHP-1) (Watson H A, et al., SHP-1: the next checkpoint target for cancer immunotherapy? Biochem Soc Trans. 2016 Apr. 15; 44(2):356-62). SHP-1 is a widely expressed inhibitory protein tyrosine phosphatase (PTP). In T-cells, it is a negative regulator of antigen-dependent activation and proliferation. It is a cytosolic protein, and therefore not amenable to antibody-mediated therapies, but its role in activation and proliferation makes it an attractive target for genetic manipulation in adoptive transfer strategies, such as chimeric antigen receptor (CAR) T cells. Immune checkpoints may also include T cell immunoreceptor with Ig and ITIM domains (TIGIT/Vstm3/WUCAM/VSIG9) and VISTA (Le Mercier I, et al., (2015) Beyond CTLA-4 and PD-1, the generation Z of negative checkpoint regulators. Front. Immunol. 6:418).

[0814] International Patent Publication No. WO 2014/172606 relates to the use of MT1 and/or MT2 inhibitors to increase proliferation and/or activity of exhausted CD8+ T-cells and to decrease CD8+ T-cell exhaustion (e.g., decrease functionally exhausted or unresponsive CD8+ immune cells). In an embodiment, metallothioneins are targeted by gene editing in adoptively transferred T cells.

[0815] In an embodiment, targets of gene editing may be at least one targeted locus involved in the expression of an immune checkpoint protein. Such targets may include, but are not limited to CTLA4, PPP2CA, PPP2CB, PTPN6, PTPN22, PDCD1, ICOS (CD278), PDL1, KIR, LAG3, HAVCR2, BTLA, CD160, TIGIT, CD96, CRTAM, LAIR1, SIGLEC7, SIGLEC9, CD244 (2B4), TNFRSF10B, TNFRSF10A, CASP8, CASP10, CASP3, CASP6, CASP7, FADD, FAS, TGFBRII, TGFRBRI, SMAD2, SMAD3, SMAD4, SMAD10, SKI, SKIL, TGIF1, IL10RA, IL10RB, HMOX2, IL6R, IL6ST, EIF2AK4, CSK, PAG1, SIT1, FOXP3, PRDM1, BATF, VISTA, GUCY1A2, GUCY1A3, GUCY1B2, GUCY1B3, MT1, MT2, CD40, OX40, CD137, GITR, CD27, SHP-1, TIM-3, CEACAM-1, CEACAM-3, or CEACAM-5. In preferred embodiments, the gene locus involved in the expression of PD-1 or CTLA-4 genes is targeted. In other preferred embodiments, combinations of genes are targeted, such as but not limited to PD-1 and TIGIT.

[0816] By means of an example and without limitation, International Patent Publication No. WO 2016/196388 concerns an engineered T cell comprising (a) a genetically engineered antigen receptor that specifically binds to an antigen, which receptor may be a CAR; and (b) a disrupted gene encoding a PD-L1, an agent for disruption of a gene encoding a PD-L1, and/or disruption of a gene encoding PD-L1, wherein the disruption of the gene may be mediated by a gene editing nuclease, a zinc finger nuclease (ZFN), CRISPR/Cas9 and/or TALEN. WO2015142675 relates to immune effector cells comprising a CAR in combination with an agent (such as the composition or system herein) that increases the efficacy of the immune effector cells in the treatment of cancer, wherein the agent may inhibit an immune inhibitory molecule, such as PD1, PD-L1, CTLA-4, TIM-3, LAG-3, VISTA, BTLA, TIGIT, LAIR1, CD160, 2B4, TGFR beta, CEACAM-1, CEACAM-3, or CEACAM-5. Ren et al., (2017) Clin Cancer Res 23 (9) 2255-2266 performed lentiviral delivery of CAR and electro-transfer of Cas9 mRNA and gRNAs targeting endogenous TCR, 0-2 microglobulin (B2M) and PD1 simultaneously, to generate gene-disrupted allogeneic CAR T cells deficient of TCR, HLA class I molecule and PD1.

[0817] In an embodiment, cells may be engineered to express a CAR, wherein expression and/or function of methylcytosine dioxygenase genes (TET1, TET2 and/or TET3) in the cells has been reduced or eliminated, (such as the composition or system herein) (for example, as described in WO201704916).

[0818] In an embodiment, editing of cells, particularly cells intended for adoptive cell therapies, more particularly immunoresponsive cells such as T cells, may be performed to knock-out or knock-down expression of an endogenous gene in a cell, said endogenous gene encoding an antigen targeted by an exogenous CAR or TCR, thereby reducing the likelihood of targeting of the engineered cells. In an embodiment, the targeted antigen may be one or more antigen selected from the group consisting of CD38, CD138, CS-1, CD33, CD26, CD30, CD53, CD92, CD100, CD148, CD150, CD200, CD261, CD262, CD362, human telomerase reverse transcriptase (hTERT), survivin, mouse double minute 2 homolog (MDM2), cytochrome P450 1B1 (CYP1B), HER2/neu, Wilms' tumor gene 1 (WTi), livin, alphafetoprotein (AFP), carcinoembryonic antigen (CEA), mucin 16 (MUC16), MUC1, prostate-specific membrane antigen (PSMA), p53, cyclin (D1), B cell maturation antigen (BCMA), transmembrane activator and CAML Interactor (TACI), and B-cell activating factor receptor (BAFF-R) (for example, as described in International Patent Publication Nos. WO 2016/011210 and WO 2017/011804).

[0819] In an embodiment, editing of cells, particularly cells intended for adoptive cell therapies, more particularly immunoresponsive cells such as T cells, may be performed to knock-out or knock-down expression of one or more MHC constituent proteins, such as one or more HLA proteins and/or beta-2 microglobulin (B2M), in a cell, whereby rejection of non-autologous (e.g., allogeneic) cells by the recipient's immune system can be reduced or avoided. In preferred embodiments, one or more HLA class I proteins, such as HLA-A, B and/or C, and/or B2M may be knocked-out or knocked-down. Preferably, B2M may be knocked-out or knocked-down. By means of an example, Ren et al., (2017) Clin Cancer Res 23 (9) 2255-2266 performed lentiviral delivery of CAR and electro-transfer of Cas mRNA and gRNAs targeting endogenous TCR, β-2 microglobulin (B2M) and PD1 simultaneously, to generate gene-disrupted allogeneic CAR T cells deficient of TCR, HLA class I molecule and PD1.

[0820] In other embodiments, at least two genes are edited. Pairs of genes may include, but are not limited to PD1 and TCRα, PD1 and TCRβ, CTLA-4 and TCRα, CTLA-4 and TCRβ, LAG3 and TCRα, LAG3 and TCRβ, Tim3 and TCRα, Tim3 and TCRβ, BTLA and TCRα, BTLA and TCRβ, BY55 and TCRα, BY55 and TCRβ, TIGIT and TCRα, TIGIT and TCRβ, B7H5 and TCRα, B7H5 and TCRβ, LAIR1 and TCRα, LAIR1 and TCRβ, SIGLEC10 and TCRα, SIGLEC10 and TCRβ, 2B4 and TCRα, 2B4 and TCRβ, B2M and TCRα, B2M and TCRβ.

[0821] In an embodiment, a cell may be multiplied edited (multiplex genome editing) as taught herein to (1) knock-out or knock-down expression of an endogenous TCR (for example, TRBC1, TRBC2 and/or TRAC), (2) knock-out or knock-down expression of an immune checkpoint protein or receptor (for example PD1, PD-L1 and/or CTLA4); and (3) knock-out or knock-down expression of one or more MHC constituent proteins (for example, HLA-A, B and/or C, and/or B2M, preferably B2M).

[0822] Whether prior to or after genetic modification of the T cells, the T cells can be activated and expanded generally using methods as described, for example, in U.S. Pat. Nos. 6,352,694; 6,534,055; 6,905,680; 5,858,358; 6,887,466; 6,905,681; 7,144,575; 7,232,566; 7,175,843; 5,883,223; 6,905,874; 6,797,514; 6,867,041; and 7,572,631. T cells can be expanded in vitro or in vivo.

[0823] Immune cells may be obtained using any method known in the art. In one embodiment, allogenic T cells may be obtained from healthy subjects. In one embodiment T cells that have infiltrated a tumor are isolated. T cells may be removed during surgery. T cells may be isolated after removal of tumor tissue by biopsy. T cells may be isolated by any means known in the art. In one embodiment, T cells are obtained by apheresis. In one embodiment, the method may comprise obtaining a bulk population of T cells from a tumor sample by any suitable method known in the art. For example, a bulk population of T cells can be obtained from a tumor sample by dissociating the tumor sample into a cell suspension from which specific cell populations can be selected. Suitable methods of obtaining a bulk population of T cells may include, but are not limited to, any one or more of mechanically dissociating (e.g., mincing) the tumor, enzymatically dissociating (e.g., digesting) the tumor, and aspiration (e.g., as with a needle).

[0824] The bulk population of T cells obtained from a tumor sample may comprise any suitable type of T cell. Preferably, the bulk population of T cells obtained from a tumor sample comprises tumor infiltrating lymphocytes (TILs).

[0825] The tumor sample may be obtained from any mammal. Unless stated otherwise, as used herein, the term “mammal” refers to any mammal including, but not limited to, mammals of the order Logomorpha, such as rabbits; the order Carnivora, including Felines (cats) and Canines (dogs); the order Artiodactyla, including Bovines (cows) and Swines (pigs); or of the order Perssodactyla, including Equines (horses). The mammals may be non-human primates, e.g., of the order Primates, Ceboids, or Simoids (monkeys) or of the order Anthropoids (humans and apes). In one embodiment, the mammal may be a mammal of the order Rodentia, such as mice and hamsters. Preferably, the mammal is a non-human primate or a human. An especially preferred mammal is the human.

[0826] T cells can be obtained from a number of sources, including peripheral blood mononuclear cells (PBMC), bone marrow, lymph node tissue, spleen tissue, and tumors. In an embodiment of the present invention, T cells can be obtained from a unit of blood collected from a subject using any number of techniques known to the skilled artisan, such as Ficoll separation. In one preferred embodiment, cells from the circulating blood of an individual are obtained by apheresis or leukapheresis. The apheresis product typically contains lymphocytes, including T cells, monocytes, granulocytes, B cells, other nucleated white blood cells, red blood cells, and platelets. In one embodiment, the cells collected by apheresis may be washed to remove the plasma fraction and to place the cells in an appropriate buffer or media for subsequent processing steps. In one embodiment of the invention, the cells are washed with phosphate buffered saline (PBS). In an alternative embodiment, the wash solution lacks calcium and may lack magnesium or may lack many if not all divalent cations. Initial activation steps in the absence of calcium lead to magnified activation. As those of ordinary skill in the art would readily appreciate a washing step may be accomplished by methods known to those in the art, such as by using a semi-automated “flow-through” centrifuge (for example, the Cobe 2991 cell processor) according to the manufacturer's instructions. After washing, the cells may be resuspended in a variety of biocompatible buffers, such as, for example, Ca-free, Mg-free PBS. Alternatively, the undesirable components of the apheresis sample may be removed and the cells directly resuspended in culture media.

[0827] In another embodiment, T cells are isolated from peripheral blood lymphocytes by lysing the red blood cells and depleting the monocytes, for example, by centrifugation through a PERCOLL™ gradient. A specific subpopulation of T cells, such as CD28+, CD4+, CDC, CD45RA+, and CD45RO+ T cells, can be further isolated by positive or negative selection techniques. For example, in one preferred embodiment, T cells are isolated by incubation with anti-CD3/anti-CD28 (i.e., 3×28)-conjugated beads, such as DYNABEADS® M-450 CD3/CD28 T, or XCYTE DYNABEADS™ for a time period sufficient for positive selection of the desired T cells. In one embodiment, the time period is about 30 minutes. In a further embodiment, the time period ranges from 30 minutes to 36 hours or longer and all integer values there between. In a further embodiment, the time period is at least 1, 2, 3, 4, 5, or 6 hours. In yet another preferred embodiment, the time period is 10 to 24 hours. In one preferred embodiment, the incubation time period is 24 hours. For isolation of T cells from patients with leukemia, use of longer incubation times, such as 24 hours, can increase cell yield. Longer incubation times may be used to isolate T cells in any situation where there are few T cells as compared to other cell types, such in isolating tumor infiltrating lymphocytes (TIL) from tumor tissue or from immunocompromised individuals. Further, use of longer incubation times can increase the efficiency of capture of CD8+ T cells.

[0828] Enrichment of a T cell population by negative selection can be accomplished with a combination of antibodies directed to surface markers unique to the negatively selected cells. A preferred method is cell sorting and/or selection via negative magnetic immunoadherence or flow cytometry that uses a cocktail of monoclonal antibodies directed to cell surface markers present on the cells negatively selected. For example, to enrich for CD4+ cells by negative selection, a monoclonal antibody cocktail typically includes antibodies to CD14, CD20, CD11b, CD16, HLA-DR, and CD8.

[0829] Further, monocyte populations (e.g., CD14+ cells) may be depleted from blood preparations by a variety of methodologies, including anti-CD14 coated beads or columns, or utilization of the phagocytotic activity of these cells to facilitate removal. Accordingly, in one embodiment, the invention uses paramagnetic particles of a size sufficient to be engulfed by phagocytotic monocytes. In an embodiment, the paramagnetic particles are commercially available beads, for example, those produced by Life Technologies under the trade name Dynabeads™. In one embodiment, other non-specific cells are removed by coating the paramagnetic particles with “irrelevant” proteins (e.g., serum proteins or antibodies). Irrelevant proteins and antibodies include those proteins and antibodies or fragments thereof that do not specifically target the T cells to be isolated. In an embodiment, the irrelevant beads include beads coated with sheep anti-mouse antibodies, goat anti-mouse antibodies, and human serum albumin.

[0830] In brief, such depletion of monocytes is performed by preincubating T cells isolated from whole blood, apheresed peripheral blood, or tumors with one or more varieties of irrelevant or non-antibody coupled paramagnetic particles at any amount that allows for removal of monocytes (approximately a 20:1 bead:cell ratio) for about 30 minutes to 2 hours at 22 to 37 degrees C., followed by magnetic removal of cells which have attached to or engulfed the paramagnetic particles. Such separation can be performed using standard methods available in the art. For example, any magnetic separation methodology may be used including a variety of which are commercially available, (e.g., DYNAL® Magnetic Particle Concentrator (DYNAL MPC®)). Assurance of requisite depletion can be monitored by a variety of methodologies known to those of ordinary skill in the art, including flow cytometric analysis of CD14 positive cells, before and after depletion.

[0831] For isolation of a desired population of cells by positive or negative selection, the concentration of cells and surface (e.g., particles such as beads) can be varied. In an embodiment, it may be desirable to significantly decrease the volume in which beads and cells are mixed together (i.e., increase the concentration of cells), to ensure maximum contact of cells and beads. For example, in one embodiment, a concentration of 2 billion cells/ml is used. In one embodiment, a concentration of 1 billion cells/ml is used. In a further embodiment, greater than 100 million cells/ml is used. In a further embodiment, a concentration of cells of 10, 15, 20, 25, 30, 35, 40, 45, or 50 million cells/ml is used. In yet another embodiment, a concentration of cells from 75, 80, 85, 90, 95, or 100 million cells/ml is used. In further embodiments, concentrations of 125 or 150 million cells/ml can be used. Using high concentrations can result in increased cell yield, cell activation, and cell expansion. Further, use of high cell concentrations allows more efficient capture of cells that may weakly express target antigens of interest, such as CD28-negative T cells, or from samples where there are many tumor cells present (i.e., leukemic blood, tumor tissue, etc). Such populations of cells may have therapeutic value and would be desirable to obtain. For example, using high concentration of cells allows more efficient selection of CD8+ T cells that normally have weaker CD28 expression.

[0832] In a related embodiment, it may be desirable to use lower concentrations of cells. By significantly diluting the mixture of T cells and surface (e.g., particles such as beads), interactions between the particles and cells is minimized. This selects for cells that express high amounts of desired antigens to be bound to the particles. For example, CD4+ T cells express higher levels of CD28 and are more efficiently captured than CD8+ T cells in dilute concentrations. In one embodiment, the concentration of cells used is 5×106/ml. In other embodiments, the concentration used can be from about 1×105/ml to 1×106/ml, and any integer value in between.

[0833] T cells can also be frozen. Wishing not to be bound by theory, the freeze and subsequent thaw step provides a more uniform product by removing granulocytes and to some extent monocytes in the cell population. After a washing step to remove plasma and platelets, the cells may be suspended in a freezing solution. While many freezing solutions and parameters are known in the art and will be useful in this context, one method involves using PBS containing 20% DMSO and 8% human serum albumin, or other suitable cell freezing media, the cells then are frozen to −80° C. at a rate of 1° per minute and stored in the vapor phase of a liquid nitrogen storage tank. Other methods of controlled freezing may be used as well as uncontrolled freezing immediately at −20° C. or in liquid nitrogen.

[0834] T cells for use in the present invention may also be antigen-specific T cells. For example, tumor-specific T cells can be used. In an embodiment, antigen-specific T cells can be isolated from a patient of interest, such as a patient afflicted with a cancer or an infectious disease. In one embodiment, neoepitopes are determined for a subject and T cells specific to these antigens are isolated. Antigen-specific cells for use in expansion may also be generated in vitro using any number of methods known in the art, for example, as described in U.S. Patent Publication No. US 20040224402 entitled, Generation and Isolation of Antigen-Specific T Cells, or in U.S. Pat. No. 6,040,177. Antigen-specific cells for use in the present invention may also be generated using any number of methods known in the art, for example, as described in Current Protocols in Immunology, or Current Protocols in Cell Biology, both published by John Wiley & Sons, Inc., Boston, Mass.

[0835] In a related embodiment, it may be desirable to sort or otherwise positively select (e.g. via magnetic selection) the antigen specific cells prior to or following one or two rounds of expansion. Sorting or positively selecting antigen-specific cells can be carried out using peptide-MHC tetramers (Altman, et al., Science. 1996 Oct. 4; 274(5284):94-6). In another embodiment, the adaptable tetramer technology approach is used (Andersen et al., 2012 Nat Protoc. 7:891-902). Tetramers are limited by the need to utilize predicted binding peptides based on prior hypotheses, and the restriction to specific HLAs. Peptide-MHC tetramers can be generated using techniques known in the art and can be made with any MHC molecule of interest and any antigen of interest as described herein. Specific epitopes to be used in this context can be identified using numerous assays known in the art. For example, the ability of a polypeptide to bind to MHC class I may be evaluated indirectly by monitoring the ability to promote incorporation of 125I labeled β2-microglobulin (β2m) into MHC class I/β2m/peptide heterotrimeric complexes (see Parker et al., J. Immunol. 152:163, 1994).

[0836] In one embodiment cells are directly labeled with an epitope-specific reagent for isolation by flow cytometry followed by characterization of phenotype and TCRs. In one embodiment, T cells are isolated by contacting with T cell specific antibodies. Sorting of antigen-specific T cells, or generally any cells of the present invention, can be carried out using any of a variety of commercially available cell sorters, including, but not limited to, MoFlo sorter (DakoCytomation, Fort Collins, Colo.), FACSAria™, FACSArray™, FACSVantage™, BD™ LSR II, and FACSCalibur™ (BD Biosciences, San Jose, Calif.).

[0837] In a preferred embodiment, the method comprises selecting cells that also express CD3. The method may comprise specifically selecting the cells in any suitable manner. Preferably, the selecting is carried out using flow cytometry. The flow cytometry may be carried out using any suitable method known in the art. The flow cytometry may employ any suitable antibodies and stains. Preferably, the antibody is chosen such that it specifically recognizes and binds to the particular biomarker being selected. For example, the specific selection of CD3, CD8, TIM-3, LAG-3, 4-1BB, or PD-1 may be carried out using anti-CD3, anti-CD8, anti-TIM-3, anti-LAG-3, anti-4-1BB, or anti-PD-1 antibodies, respectively. The antibody or antibodies may be conjugated to a bead (e.g., a magnetic bead) or to a fluorochrome. Preferably, the flow cytometry is fluorescence-activated cell sorting (FACS). TCRs expressed on T cells can be selected based on reactivity to autologous tumors. Additionally, T cells that are reactive to tumors can be selected for based on markers using the methods described in patent publication Nos. WO2014133567 and WO2014133568, herein incorporated by reference in their entirety. Additionally, activated T cells can be selected for based on surface expression of CD107a.

[0838] In one embodiment of the invention, the method further comprises expanding the numbers of T cells in the enriched cell population. Such methods are described in U.S. Pat. No. 8,637,307 and is herein incorporated by reference in its entirety. The numbers of T cells may be increased at least about 3-fold (or 4-, 5-, 6-, 7-, 8-, or 9-fold), more preferably at least about 10-fold (or 20-, 30-, 40-, 50-, 60-, 70-, 80-, or 90-fold), more preferably at least about 100-fold, more preferably at least about 1,000 fold, or most preferably at least about 100,000-fold. The numbers of T cells may be expanded using any suitable method known in the art. Exemplary methods of expanding the numbers of cells are described in patent publication No. WO 2003/057171, U.S. Pat. No. 8,034,334, and U.S. Patent Publication No. 2012/0244133, each of which is incorporated herein by reference.

[0839] In one embodiment, ex vivo T cell expansion can be performed by isolation of T cells and subsequent stimulation or activation followed by further expansion. In one embodiment of the invention, the T cells may be stimulated or activated by a single agent. In another embodiment, T cells are stimulated or activated with two agents, one that induces a primary signal and a second that is a co-stimulatory signal. Ligands useful for stimulating a single signal or stimulating a primary signal and an accessory molecule that stimulates a second signal may be used in soluble form. Ligands may be attached to the surface of a cell, to an Engineered Multivalent Signaling Platform (EMSP), or immobilized on a surface. In a preferred embodiment both primary and secondary agents are co-immobilized on a surface, for example a bead or a cell. In one embodiment, the molecule providing the primary activation signal may be a CD3 ligand, and the co-stimulatory molecule may be a CD28 ligand or 4-1BB ligand.

[0840] In an embodiment, T cells comprising a CAR or an exogenous TCR, may be manufactured as described in International Patent Publication No. WO 2015/120096, by a method comprising enriching a population of lymphocytes obtained from a donor subject; stimulating the population of lymphocytes with one or more T-cell stimulating agents to produce a population of activated T cells, wherein the stimulation is performed in a closed system using serum-free culture medium; transducing the population of activated T cells with a viral vector comprising a nucleic acid molecule which encodes the CAR or TCR, using a single cycle transduction to produce a population of transduced T cells, wherein the transduction is performed in a closed system using serum-free culture medium; and expanding the population of transduced T cells for a predetermined time to produce a population of engineered T cells, wherein the expansion is performed in a closed system using serum-free culture medium. In an embodiment, T cells comprising a CAR or an exogenous TCR, may be manufactured as described in WO 2015/120096, by a method comprising: obtaining a population of lymphocytes; stimulating the population of lymphocytes with one or more stimulating agents to produce a population of activated T cells, wherein the stimulation is performed in a closed system using serum-free culture medium; transducing the population of activated T cells with a viral vector comprising a nucleic acid molecule which encodes the CAR or TCR, using at least one cycle transduction to produce a population of transduced T cells, wherein the transduction is performed in a closed system using serum-free culture medium; and expanding the population of transduced T cells to produce a population of engineered T cells, wherein the expansion is performed in a closed system using serum-free culture medium. The predetermined time for expanding the population of transduced T cells may be 3 days. The time from enriching the population of lymphocytes to producing the engineered T cells may be 6 days. The closed system may be a closed bag system. Further provided is population of T cells comprising a CAR or an exogenous TCR obtainable or obtained by said method, and a pharmaceutical composition comprising such cells.

[0841] In an embodiment, T cell maturation or differentiation in vitro may be delayed or inhibited by the method as described in International Patent Publication No. WO 2017/070395, comprising contacting one or more T cells from a subject in need of a T cell therapy with an AKT inhibitor (such as, e.g., one or a combination of two or more AKT inhibitors disclosed in claim 8 of WO2017070395) and at least one of exogenous Interleukin-7 (IL-7) and exogenous Interleukin-15 (IL-15), wherein the resulting T cells exhibit delayed maturation or differentiation, and/or wherein the resulting T cells exhibit improved T cell function (such as, e.g., increased T cell proliferation; increased cytokine production; and/or increased cytolytic activity) relative to a T cell function of a T cell cultured in the absence of an AKT inhibitor.

[0842] In an embodiment, a patient in need of a T cell therapy may be conditioned by a method as described in International Patent Publication No. WO 2016/191756 comprising administering to the patient a dose of cyclophosphamide between 200 mg/m2/day and 2000 mg/m2/day and a dose of fludarabine between 20 mg/m2/day and 900 mg/m²/day.

### Diseases

[0843] Genetic Diseases and Diseases with a Genetic and/or Epigenetic Aspect

[0844] The compositions, systems, or components thereof can be used to treat and/or prevent a genetic disease or a disease with a genetic and/or epigenetic aspect. The genes and conditions exemplified herein are not exhaustive. In one embodiment, a method of treating and/or preventing a genetic disease can include administering a composition, system, and/or one or more components thereof to a subject, where the composition, system, and/or one or more components thereof is capable of modifying one or more copies of one or more genes associated with the genetic disease or a disease with a genetic and/or epigenetic aspect in one or more cells of the subject. In one embodiment, modifying one or more copies of one or more genes associated with a genetic disease or a disease with a genetic and/or epigenetic aspect in the subject can eliminate a genetic disease or a symptom thereof in the subject. In one embodiment, modifying one or more copies of one or more genes associated with a genetic disease or a disease with a genetic and/or epigenetic aspect in the subject can decrease the severity of a genetic disease or a symptom thereof in the subject. In one embodiment, the compositions, systems, or components thereof can modify one or more genes or polynucleotides associated with one or more diseases, including genetic diseases and/or those having a genetic aspect and/or epigenetic aspect, including but not limited to, any one or more set forth in Table 6. It will be appreciated that those diseases and associated genes listed herein are non-exhaustive and non-limiting. Further some genes play roles in the development of multiple diseases.

TABLE 6
Exemplary Genetic and Other Diseases and Associated Genes

| | Primary | | |
|---|---|---|---|
| | Tissues or | Additional | |
| | System | Tissues/Systems | |
| Disease Name | Affected | Affected | Genes |
| Achondroplasia | Bone and | | fibroblast growth factor receptor 3 |
| | Muscle | | (FGFR3) |
| Achromatopsia | eye | | CNGA3, CNGB3, GNAT2, PDE6C, |
| | | | PDE6H, ACHM2, ACHM3, |
| Acute Renal Injury | kidney | | NFkappaB, AATF, p85alpha, FAS, |
| | | | Apoptosis cascade elements (e.g. |
| | | | FASR, Caspase 2, 3, 4, 6, 7, 8, 9, 10, |
| | | | AKT, TNF alpha, IGF1, IGF1R, |
| | | | RIPK1), p53 |
| Age Related Macular | eye | | Abcr; CCL2; CC2; CP |
| Degeneration | | | (ceruloplasmin); Timp3; cathepsinD; |
| | | | VLDLR, CCR2 |
| AIDS | Immune System | | KIR3DL1, NKAT3, NKB1, AMB11, |
| | | | KIR3DS1, IFNG, CXCL12, SDF1 |
| Albinism (including | Skin, hair, eyes, | | TYR, OCA2, TYRP1, and SLC45A2, |
| oculocutaneous albinism (types | | | SLC24A5 and C10orf11 |
| 1-7) and ocular albinism) | | | |
| Alkaptonuria | Metabolism of | Tissues/organs | HGD |
| | amino acids | where | |
| | | homogentisic acid | |
| | | accumulates, | |
| | | particularly | |
| | | cartilage (joints), | |
| | | heart valves, | |
| | | kidneys | |
| alpha-1 antitrypsin deficiency | Lung | Liver, skin, | SERPINA1, those set forth in |
| (AATD or A1AD) | | vascular system, | WO2017165862, PiZ allele |
| | | kidneys, GI | |
| ALS | CNS | | SOD1; ALS2; ALS3; ALS5; |
| | | | ALS7; STEX; FUS; TARDBP; VEGF |
| | | | (VEGF-a; |
| | | | VEGF-b; VEGF-c); DPP6; NEFH, |
| | | | PTGS1, SLC1A2, TNFRSF10B, |
| | | | PRPH, HSP90AA1, CRIA2, IFNG, |
| | | | AMPA2 S100B, FGF2, AOX1, CS, |
| | | | TXN, RAPHJ1, MAP3K5, NBEAL1, |
| | | | GPX1, ICA1L, RAC1, MAPT, |
| | | | ITPR2, ALS2CR4, GLS, ALS2CR8, |
| | | | CNTFR, ALS2CR11, FOLH1, |
| | | | FAM117B, P4HB, CNTF, SQSTM1, |
| | | | STRADB, NAIP, NLR, YWHAQ, |
| | | | SLC33A1, TRAK2, SCA1, NIF3L1, |
| | | | NIF3, PARD3B, COX8A, CDK15, |
| | | | HECW1, HECT, C2, WW 15, NOS1, |
| | | | MET, SOD2, HSPB1, NEFL, CTSB, |
| | | | ANG, HSPA8, RNase A, VAPB, |
| | | | VAMP, SNCA, alpha HGF, CAT, |
| | | | ACTB, NEFM, TH, BCL2, FAS, |
| | | | CASP3, CLU, SMN1, G6PD, BAX, |
| | | | HSF1, RNF19A, JUN, ALS2CR12, |
| | | | HSPA5, MAPK14, APEX1, |
| | | | TXNRD1, NOS2, TIMP1, CASP9, |
| | | | XIAP, GLG1, EPO, VEGFA, ELN, |
| | | | GDNF, NFE2L2, SLC6A3, HSPA4, |
| | | | APOE, PSMB8, DCTN2, TIMP3, |
| | | | KIFAP3, SLC1A1, SMN2, CCNC, |
| | | | STUB1, ALS2, PRDX6, SYP, |
| | | | CABIN1, CASP1, GART, CDK5, |
| | | | ATXN3, RTN4, C1QB, VEGFC, |
| | | | HTT, PARK7, XDH, GFAP, MAP2, |
| | | | CYCS, FCGR3B, CCS, UBL5, |
| | | | MMP9m SLC18A3, TRPM7, |
| | | | HSPB2, AKT1, DEERL1, CCL2, |
| | | | NGRN, GSR, TPPP3, APAF1, |
| | | | BTBD10, GLUD1, CXCR4, S:C1A3, |
| | | | FLT1, PON1, AR, LIF, ERBB3, |
| | | | :GA:S1, CD44, TP53, TLR3, GRIA1, |
| | | | GAPDH, AMPA, GRIK1, DES, |
| | | | CHAT, FLT4, CHMP2B, BAG1, |
| | | | CHRNA4, GSS, BAK1, KDR, |
| | | | GSTP1, OGG1, IL6 |
| Alzheimer's Disease | Brain | | E1; CHIP; UCH; UBB; Tau; LRP; |
| | | | PICALM; CLU; PS1; |
| | | | SORL1; CR1; VLDLR; UBA1; |
| | | | UBA3; CHIP28; AQP1; UCHL1; |
| | | | UCHL3; APP, AAA, CVAP, AD1, |
| | | | APOE, AD2, DCP1, ACE1, MPO, |
| | | | PACIP1, PAXIP1L, PTIP, A2M, |
| | | | BLMH, BMH, PSEN1, AD3, |
| | | | ALAS2, ABCA1, BIN1, BDNF, |
| | | | BTNL8, C1ORF49, CDH4, |
| | | | CHRNB2, CKLFSF2, CLEC4E, |
| | | | CR1L, CSF3R, CST3, CYP2C, |
| | | | DAPK1, ESR1, FCAR, FCGR3B, |
| | | | FFA2, FGA, GAB2, GALP, |
| | | | GAPDHS, GMPB, HP, HTR7, IDE, |
| | | | IF127, IFI6, IFIT2, IL1RN, IL-1RA, |
| | | | IL8RA, IL8RB, JAG1, KCNJ15, |
| | | | LRP6, MAPT, MARK4, |
| | | | MPHOSPH1, MTHFR, NBN, |
| | | | NCSTN, NIACR2, NMNAT3, NTM, |
| | | | ORM1, P2RY13, PBEF1, PCK1, |
| | | | PICALM, PLAU, PLXNC1, PRNP, |
| | | | PSEN1, PSEN2, PTPRA, RALGPS2, |
| | | | RGSL2, SELENBP1, SLC25A37, |
| | | | SORL1, Mitoferrin-1, TF, TFAM, |
| | | | TNF, TNFRSF10C, UBE1C |
| Amyloidosis | | | APOA1, APP, AAA, CVAP, AD1, |
| | | | GSN, FGA, LYZ, TTR, PALB |
| Amyloid neuropathy | | | TTR, PALB |
| Anemia | Blood | | CDAN1, CDA1, RPS19, DBA, |
| | | | PKLR, PK1, NT5C3, UMPH1, PSN1, |
| | | | RHAG, RH50A, NRAMP2, SPTB, |
| | | | ALAS2, ANH1, ASB, ABCB7, |
| | | | ABC7, ASAT |
| Angelman Syndrome | Nervous system, | | UBE3A |
| | brain | | |
| Attention Deficit Hyperactivity | Brain | | PTCHD1 |
| Disorder (ADHD) | | | |
| Autoimmune | Immune system | | TNFRSF6, APT1, FAS, CD95, |
| lymphoproliferative syndrome | | | ALPS1A |
| Autism, Autism spectrum | Brain | | PTCHD1; Mecp2; BZRAP1; |
| disorders (ASDs), including | | | MDGA2; Sema5A; Neurexin 1; |
| Asperger's and a general | | | GLO1, RTT, PPMX, MRX16, RX79, |
| diagnostic category called | | | NLGN3, NLGN4, KIAA1260, |
| Pervasive Developmental | | | AUTSX2, FMR1, FMR2; FXR1; |
| Disorders (PDDs) | | | FXR2; MGLUR5, ATP10C, CDH10, |
| | | | GRM6, MGLUR6, CDH9, CNTN4, |
| | | | NLGN2, CNTNAP2, SEMA5A, |
| | | | DHCR7, NLGN4X, NLGN4Y, DPP6, |
| | | | NLGN5, EN2, NRCAM, MDGA2, |
| | | | NRXN1, FMR2, AFF2, FOXP2, |
| | | | OR4M2, OXTR, FXR1, FXR2, PAH, |
| | | | GABRA1, PTEN, GABRA5, |
| | | | PTPRZ1, GABRB3, GABRG1, |
| | | | HIRIP3, SEZ6L2, HOXA1, |
| | | | SHANK3, IL6, SHBZRAP1, |
| | | | LAMB1, SLC6A4, SERT, MAPK3, |
| | | | TAS2R1, MAZ, TSC1, MDGA2, |
| | | | TSC2, MECP2, UBE3A, WNT2, see |
| | | | also 20110023145 |
| autosomal dominant polycystic | kidney | liver | PKD1, PKD2 |
| kidney disease (ADPKD)- | | | |
| (includes diseases such as von | | | |
| Hippel-Lindau disease and | | | |
| tubreous sclerosis complex | | | |
| disease) | | | |
| Autosomal Recessive Polycystic | kidney | liver | PKDH1 |
| Kidney Disease (ARPKD) | | | |
| Ataxia-Telangiectasia (a.k.a | Nervous system, | various | ATM |
| Louis Bar syndrome) | immune system | | |
| B-Cell Non-Hodgkin | | | BCL7A, BCL7 |
| Lymphoma | | | |
| Bardet-Biedl syndrome | Eye, | Liver, ear, | ARL6, BBS1, BBS2, BBS4, BBS5, |
| | musculoskeletal | gastrointestinal | BBS7, BBS9, BBS10, BBS12, |
| | system, kidney, | system, brain | CEP290, INPP5E, LZTFL1, MKKS, |
| | reproductive | | MKS1, SDCCAG8, TRIM32, TTC8 |
| | organs | | |
| Bare Lymphocyte Syndrome | blood | | TAPBP, TPSN, TAP2, ABCB3, |
| | | | PSF2, RING11, MHC2TA, C2TA, |
| | | | RFX5, RFXAP, RFX5 |
| Bartter's Syndrome (types I, II, | kidney | | SLC12A1 (type I), KCNJ1 (type II), |
| III, IVA and B, and V) | | | CLCNKB (type III), BSND (type IV |
| | | | A), or both the CLCNKA CLCNKB |
| | | | genes (type IV B), CASR (type V). |
| Becker muscular dystrophy | Muscle | | DMD, BMD, MYF6 |
| Best Disease (Vitelliform | eye | | VMD2 |
| Macular Dystrophy type 2) | | | |
| Bleeding Disorders | blood | | TBXA2R, P2RX1, P2X1 |
| Blue Cone Monochromacy | eye | | OPN1LW, OPN1MW, and LCR |
| Breast Cancer | Breast tissue | | BRCA1, BRCA2, COX-2 |
| Bruton's Disease (aka X-linked | Immune system, | | BTK |
| Agammglobulinemia) | specifically B | | |
| | cells | | |
| Cancers (e.g., lymphoma, | Various | | FAS, BID, CTLA4, PDCD1, CBLB, |
| chronic lymphocytic leukemia | | | PTPN6, TRAC, TRBC, those |
| (CLL), B cell acute lymphocytic | | | described in WO2015048577 |
| leukemia (B-ALL), acute | | | |
| lymphoblastic leukemia, acute | | | |
| myeloid leukemia, non- | | | |
| Hodgkin's lymphoma (NHL), | | | |
| diffuse large cell lymphoma | | | |
| (DLCL), multiple myeloma, | | | |
| renal cell carcinoma (RCC), | | | |
| neuroblastoma, colorectal | | | |
| cancer, breast cancer, ovarian | | | |
| cancer, melanoma, sarcoma, | | | |
| prostate cancer, lung cancer, | | | |
| esophageal cancer, | | | |
| hepatocellular carcinoma, | | | |
| pancreatic cancer, astrocytoma, | | | |
| mesothelioma, head and neck | | | |
| cancer, and medulloblastoma | | | |
| Cardiovascular Diseases | heart | Vascular system | IL1B, XDH, TP53, PTGS, MB, IL4, |
| | | | ANGPT1, ABCGu8, CTSK, PTGIR, |
| | | | KCNJ11, INS, CRP, PDGFRB, |
| | | | CCNA2, PDGFB, KCNJ5, KCNN3, |
| | | | CAPN10, ADRA2B, ABCG5, |
| | | | PRDX2, CPAN5, PARP14, MEX3C, |
| | | | ACE, RNF, IL6, TNF, STN, |
| | | | SERPINE1, ALB, ADIPOQ, APOB, |
| | | | APOE, LEP, MTHFR, APOA1, |
| | | | EDN1, NPPB, NOS3, PPARG, |
| | | | PLAT, PTGS2, CETP, AGTR1, |
| | | | HMGCR, IGF1, SELE, REN, |
| | | | PPARA, PON1, KNG1, CCL2, LPL, |
| | | | VWF, F2, ICAM1, TGFB, NPPA, |
| | | | IL10, EPO, SOD1, VCAM1, IFNG, |
| | | | LPA, MPO, ESR1, MAPK, HP, F3, |
| | | | CST3, COG2, MMP9, SERPINC1, |
| | | | F8, HMOX1, APOC3, IL8, PROL1, |
| | | | CBS, NOS2, TLR4, SELP, ABCA1, |
| | | | AGT, LDLR, GPT, VEGFA, NR3C2, |
| | | | IL18, NOS1, NR3C1, FGB, HGF, |
| | | | IL1A, AKT1, LIPC, HSPD1, |
| | | | MAPK14, SPP1, ITGB3, CAT, |
| | | | UTS2, THBD, F10, CP, |
| | | | TNFRSF11B, EGFR, MMP2, PLG, |
| | | | NPY, RHOD, MAPK8, MYC, FN1, |
| | | | CMA1, PLAU, GNB3, ADRB2, |
| | | | SOD2, F5, VDR, ALOX5, HLA- |
| | | | DRB1, PARP1, CD40LG, PON2, |
| | | | AGER, IRS1, PTGS1, ECE1, F7, |
| | | | IRMN, EPHX2, IGFBP1, MAPK10, |
| | | | FAS, ABCB1, JUN, IGFBP3, CD14, |
| | | | PDE5A, AGTR2, CD40, LCAT, |
| | | | CCR5, MMP1, TIMP1, ADM, |
| | | | DYT10, STAT3, MMP3, ELN, |
| | | | USF1, CFH, HSPA4, MMP12, MME, |
| | | | F2R, SELL, CTSB, ANXA5, |
| | | | ADRB1, CYBA, FGA, GGT1, LIPG, |
| | | | HIF1A, CXCR4, PROC, SCARB1, |
| | | | CD79A, PLTP, ADD1, FGG, SAA1, |
| | | | KCNH2, DPP4, NPR1, VTN, |
| | | | KIAA0101, FOS, TLR2, PPIG, |
| | | | IL1R1, AR, CYP1A1, SERPINA1, |
| | | | MTR, RBP4, APOA4, CDKN2A, |
| | | | FGF2, EDNRB, ITGA2, VLA-2, |
| | | | CABIN1, SHBG, HMGB1, |
| | | | HSP90B2P, CYP3A4, GJA1, CAV1, |
| | | | ESR2, LTA, GDF15, BDNF, |
| | | | CYP2D6, NGF, SP1, TGIF1, SRC, |
| | | | EGF, PIK3CG, HLA-A, KCNQ1, |
| | | | CNR1, FBN1, CHKA, BEST1, |
| | | | CTNNB1, IL2, CD36, PRKAB1, |
| | | | TPO, ALDH7A1, CX3CR1, TH, F9, |
| | | | CH1, TF, HFE, IL17A, PTEN, |
| | | | GSTM1, DMD, GATA4, F13A1, |
| | | | TTR, FABP4, PON3, APOC1, INSR, |
| | | | TNFRSF1B, HTR2A, CSF3, |
| | | | CYP2C9, TXN, CYP11B2, PTH, |
| | | | CSF2, KDR, PLA2G2A, THBS1, |
| | | | GCG, RHOA, ALDH2, TCF7L2, |
| | | | NFE2L2, NOTCH1, UGT1A1, |
| | | | IFNA1, PPARD, SIRT1, GNHR1, |
| | | | PAPPA, ARR3, NPPC, AHSP, |
| | | | PTK2, IL13, MTOR, ITGB2, GSTT1, |
| | | | IL6ST, CPB2, CYP1A2, HNF4A, |
| | | | SLC64A, PLA2G6, TNFSF11, |
| | | | SLC8A1, F2RL1, AKR1A1, |
| | | | ALDH9A1, BGLAP, MTTP, MTRR, |
| | | | SULT1A3, RAGE, C4B, P2RY12, |
| | | | RNLS, CREB1, POMC, RAC1, |
| | | | LMNA, CD59, SCM5A, CYP1B1, |
| | | | MIF, MMP13, TIMP2, CYP19A1, |
| | | | CUP21A2, PTPN22, MYH14, MBL2, |
| | | | SELPLG, AOC3, CTSL1, PCNA, |
| | | | IGF2, ITGB1, CAST, CXCL12, |
| | | | IGHE, KCNE1, TFRC, COL1A1, |
| | | | COL1A2, IL2RB, PLA2G10, |
| | | | ANGPT2, PROCR, NOX4, HAMP, |
| | | | PTPN11, SLCA1, IL2RA, CCL5, |
| | | | IRF1, CF:AR, CA:CA, EIF4E, |
| | | | GSTP1, JAK2, CYP3A5, HSPG2, |
| | | | CCL3, MYD88, VIP, SOAT1, |
| | | | ADRBK1, NR4A2, MMP8, NPR2, |
| | | | GCH1, EPRS, PPARGC1A, F12, |
| | | | PECAM1, CCL4, CERPINA34, |
| | | | CASR, FABP2, TTF2, PROS1, |
| | | | CTF1, SGCB, YME1L1, CAMP, |
| | | | ZC3H12A, AKR1B1, MMP7, AHR, |
| | | | CSF1, HDAC9, CTGF, KCNMA1, |
| | | | UGT1A, PRKCA, COMT, S100B, |
| | | | EGR1, PRL, IL15, DRD4, CAMK2G, |
| | | | SLC22A2, CCL11, PGF, THPO, |
| | | | GP6, TACR1, NTS, HNF1A, SST, |
| | | | KCDN1, LOC646627, TBXAS1, |
| | | | CUP2J2, TBXA2R, ADH1C, |
| | | | ALOX12, AHSG, BHMT, GJA4, |
| | | | SLC25A4, ACLY, ALOX5AP, |
| | | | NUMA1, CYP27B1, CYSLTR2, |
| | | | SOD3, LTC4S, UCN, GHRL, |
| | | | APOC2, CLEC4A, KBTBD10, TNC, |
| | | | TYMS, SHC1, LRP1, SOCS3, |
| | | | ADH1B, KLK3, HSD11B1, |
| | | | VKORC1, SERPINB2, TNS1, |
| | | | RNF19A, EPOR, ITGAM, PITX2, |
| | | | MAPK7, FCGR3A, LEEPR, ENG, |
| | | | GPX1, GOT2, HRH1, NR112, CRH, |
| | | | HTR1A, VDAC1, HPSE, SFTPD, |
| | | | TAP2, RMF123, PTK2Bm NTRK2, |
| | | | IL6R, ACHE, GLP1R, GHR, GSR, |
| | | | NQO1, NR5A1, GJB2, SLC9A1, |
| | | | MAOA, PCSK9, FCGR2A, |
| | | | SERPINF1, EDN3, UCP2, TFAP2A, |
| | | | C4BPA, SERPINF2, TYMP, ALPP, |
| | | | CXCR2, SLC3A3, ABCG2, ADA, |
| | | | JAK3, HSPA1A, FASN, FGF1, F11, |
| | | | ATP7A, CR1, GFPA, ROCK1, |
| | | | MECP2, MYLK, BCHE, LIPE, |
| | | | ADORA1, WRN, CXCR3, CD81, |
| | | | SMAD7, LAMC2, MAP3K5, CHGA, |
| | | | IAPP, RHO, ENPP1, PTHLH, NRG1, |
| | | | VEGFC, ENPEP, CEBPB, NAGLU,. |
| | | | F2RL3, CX3CL1, BDKRB1, |
| | | | ADAMTS13, ELANE, ENPP2, |
| | | | CISH, GAST, MYOC, ATP1A2, |
| | | | NF1, GJB1, MEF2A, VCL, BMPR2, |
| | | | TUBB, CDC42, KRT18, HSF1, |
| | | | MYB, PRKAA2, ROCK2, TFP1, |
| | | | PRKG1, BMP2, CTNND1, CTH, |
| | | | CTSS, VAV2, NPY2R, IGFBP2, |
| | | | CD28, GSTA1, PPIA, APOH, |
| | | | S100A8, IL11, ALOX15, FBLNI, |
| | | | NR1H3, SCD, GIP, CHGB, PRKCB, |
| | | | SRD5A1, HSD11B2, CALCRL, |
| | | | GALNT2, ANGPTL4, KCNN4, |
| | | | PIK3C2A, HBEGF, CYP7A1, HLA- |
| | | | DRB5, BNIP3, GCKR, S100A12, |
| | | | PADI4, HSPA14, CXCR1, H19, |
| | | | KRTAP19-3, IDDM2, RAC2, YRY1, |
| | | | CLOCK, NGFR, DBH, CHRNA4, |
| | | | CACNA1C, PRKAG2, CHAT, |
| | | | PTGDS, NR1H2, TEK, VEGFB, |
| | | | MEF2C, MAPKAPK2, TNFRSF11A, |
| | | | HSPA9, CYSLTR1, MAT1A, |
| | | | OPRL1, IMPA1, CLCN2, DLD, |
| | | | PSMA6, PSMB8, CHI3L1, |
| | | | ALDH1B1, PARP2, STAR, LBP, |
| | | | ABCC6, RGS2, EFNB2, GJB6, |
| | | | APOA2, AMPD1, DYSF, |
| | | | FDFT1, EMD2, CCR6, GJB3, |
| | | | IL1RL1, ENTPD1, BBS4, CELSR2, |
| | | | F11R, RAPGEF3, HYAL1, ZNF259, |
| | | | ATOX1, ATF6, KHK, SAT1, GGH, |
| | | | TIMP4, SLC4A4, PDE2A, PDE3B, |
| | | | FADS1, FADS2, TMSB4X, TXNIP, |
| | | | LIMS1, RHOB, LY96, FOXO1, |
| | | | PNPLA2, TRH, GJC1, S:C17A5, |
| | | | FTO, GJD2, PRSC1, CASP12, |
| | | | GPBAR1, PXK, IL33, TRIB1, PBX4, |
| | | | NUPR1, 15-SEP, CILP2, TERC, |
| | | | GGT2, MTCO1, UOX, AVP |
| Cataract | eye | | CRYAA, CRYA1, CRYBB2, |
| | | | CRYB2, PITX3, BFSP2, CP49, |
| | | | CP47, CRYAA, CRYA1, PAX6, |
| | | | AN2, MGDA, CRYBA1, CRYB1, |
| | | | CRYGC, CRYG3, CCL, LIM2, |
| | | | MP19, CRYGD, CRYG4, BFSP2, |
| | | | CP49, CP47, HSF4, CTM, HSF4, |
| | | | CTM, MIP, AQP0, CRYAB, |
| | | | CRYA2, CTPP2, CRYBB1, CRYGD, |
| | | | CRYG4, CRYBB2, CRYB2, |
| | | | CRYGC, CRYG3, CCL, CRYAA, |
| | | | CRYA1, GJA8, CX50, CAE1, GJA3, |
| | | | CX46, CZP3, CAE3, CCM1, CAM, |
| | | | KRIT1 |
| CDKL-5 Deficiencies or | Brain, CNS | | CDKL5 |
| Mediated Diseases | | | |
| Charcot-Marie-Tooth (CMT) | Nervous system | Muscles | PMP22 (CMT1A and E), MPZ |
| disease (Types 1, 2, 3, 4,) | | (dystrophy) | (CMT1B), LITAF (CMT1C), EGR2 |
| | | | (CMT1D), NEFL (CMT1F), GJB1 |
| | | | (CMT1X), MFN2 (CMT2A), KIF1B |
| | | | (CMT2A2B), RAB7A (CMT2B), |
| | | | TRPV4 (CMT2C), GARS (CMT2D), |
| | | | NEFL (CMT2E), GAPD1 (CMT2K), |
| | | | HSPB8 (CMT2L), DYNC1H1, |
| | | | CMT2O), LRSAM1 (CMT2P), |
| | | | IGHMBP2 (CMT2S), MORC2 |
| | | | (CMT2Z), GDAP1 (CMT4A), |
| | | | MTMR2 or SBF2/MTMR13 |
| | | | (CMT4B), SH3TC2 (CMT4C), |
| | | | NDRG1 (CMT4D), PRX (CMT4F), |
| | | | FIG4 (CMT4J), NT-3 |
| Chediak-Higashi Syndrome | Immune system | Skin, hair, eyes, | LYST |
| | | neurons | |
| Choroidermia | | | CHM, REP1, |
| Chorioretinal atrophy | eye | | PRDM13, RGR, TEAD1 |
| Chronic Granulomatous Disease | Immune system | | CYBA, CYBB, NCF1, NCF2, NCF4 |
| Chronic Mucocutaneous | Immune system | | AIRE, CARD9, CLEC7A IL12B, |
| Candidiasis | | | IL12B1, IL1F, IL17RA, IL17RC, |
| | | | RORC, STAT1, STAT3, TRAF31P2 |
| Cirrhosis | liver | | KRT18, KRT8, CIRH1A, NAIC, |
| | | | TEX292, KIAA1988 |
| Colon cancer (Familial | Gastrointestinal | | FAP: APC HNPCC: MSH2, |
| adenomatous polyposis (FAP) | | | MLH1, PMS2, SH6, PMS1 |
| and hereditary nonpolyposis | | | |
| colon cancer (HNPCC)) | | | |
| Combined Immunodeficiency | Immune System | | IL2RG, SCIDX1, SCIDX, IMD4); |
| | | | HIV-1 (CCL5, SCYA5, D17S136E, |
| | | | TCP228 |
| Cone(-rod) dystrophy | eye | | AIPL1, CRX, GUA1A, GUCY2D, |
| | | | PITPM3, PROM1, PRPH2, RIMS1, |
| | | | SEMA4A, ABCA4, ADAM9, ATF6, |
| | | | C21ORF2, C8ORF37, CACNA2D4, |
| | | | CDHR1, CERKL, CNGA3, CNGB3, |
| | | | CNNM4, CNAT2, IFT81, KCNV2, |
| | | | PDE6C, PDE6H, POC1B, RAX2, |
| | | | RDH5, RPGRIP1, TTLL5, RetCG1, |
| | | | GUCY2E |
| Congenital Stationary Night | eye | | CABP4, CACNA1F, CACNA2D4, |
| Blindness | | | GNAT1, CPR179, GRK1, GRM6, |
| | | | LRIT3, NYX, PDE6B, RDH5, RHO, |
| | | | RLBP1, RPE65, SAG, SLC24A1, |
| | | | TRPM1, |
| Congenital Fructose Intolerance | Metabolism | | ALDOB |
| Cori's Disease (Glycogen | Various- | | AGL |
| Storage Disease Type III) | wherever | | |
| | glycogen | | |
| | accumulates, | | |
| | particularly | | |
| | liver, heart, | | |
| | skeletal muscle | | |
| Corneal clouding and dystrophy | eye | | APOA1, TGFBI, CSD2, CDGG1, |
| | | | CSD, BIGH3, CDG2, TACSTD2, |
| | | | TROP2, M1S1, VSX1, RINX, PPCD, |
| | | | PPD, KTCN, COL8A2, FECD, |
| | | | PPCD2, PIP5K3, CFD |
| Cornea plana congenital | | | KERA, CNA2 |
| Cri du chat Syndrome, also | | | Deletions involving only band 5p15.2 |
| known as 5p syndrome and cat | | | to the entire short arm of chromosome |
| cry syndrome | | | 5, e.g. CTNND2, TERT, |
| Cystic Fibrosis (CF) | Lungs and | Pancreas, liver, | CTFR, ABCC7, CF, MRP7, |
| | respiratory | digestive system, | SCNN1A, those described in |
| | system | reproductive | WO2015157070 |
| | | system, exocrine, | |
| | | glands, | |
| Diabetic nephropathy | kidney | | Gremlin, 12/15-lipoxygenase, |
| | | | TIM44, |
| Dent Disease (Types 1 and 2) | Kidney | | Type 1: CLCN5, Type 2: ORCL |
| Dentatorubro-Pallidoluysian | CNS, brain, | | Atrophin-1 and Atn1 |
| Atrophy (DRPLA) (aka Haw | muscle | | |
| River and Naito-Oyanagi | | | |
| Disease) | | | |
| Down Syndrome | various | | Chromosome 21 trisomy |
| Drug Addiction | Brain | | Prkce; Drd2; Drd4; ABAT; |
| | | | GRIA2; Grm5; Grin1; Htr1b; Grin2a; |
| | | | Drd3; Pdyn; Gria1 |
| Duane syndrome (Types 1, 2, | eye | | CHN1, indels on chromosomes 4 and |
| and 3, including subgroups A, B | | | 8 |
| and C). Other names for this | | | |
| condition include: Duane's | | | |
| Retraction Syndrome (or DR | | | |
| syndrome), Eye Retraction | | | |
| Syndrome, Retraction | | | |
| Syndrome, Congenital retraction | | | |
| syndrome and Stilling-Turk- | | | |
| Duane Syndrome | | | |
| Duchenne muscular dystrophy | muscle | Cardiovascular, | DMD, BMD, dystrophin gene, intron |
| (DMD) | | respiratory | flanking exon 51 of DMD gene, exon |
| | | | 51 mutations in DMD gene, see also |
| | | | WO2013163628 and US Pat. Pub. |
| | | | 20130145487 |
| Edward's Syndrome | | | Complete or partial trisomy of |
| (Trisomy 18) | | | chromosome 18 |
| Ehlers-Danlos Syndrome (Types | Various | | COL5A1, COL5A2, COL1A1, |
| I-VI) | depending on | | COL3A1, TNXB, PLOD1, COL1A2, |
| | type: including | | FKBP14 and ADAMTS2 |
| | musculoskeletal, | | |
| | eye, vasculature, | | |
| | immune, and | | |
| | skin | | |
| Emery-Dreifuss muscular | muscle | | LMNA, LMN1, EMD2, FPLD, |
| dystrophy | | | CMD1A, HGPS, LGMD1B, LMNA, |
| | | | LMN1, EMD2, FPLD, CMD1A |
| Enhanced S-Cone Syndrome | eye | | NR2E3, NRL |
| Fabry's Disease | Various- | | GLA |
| | including skin, | | |
| | eyes, and | | |
| | gastrointestinal | | |
| | system, kidney, | | |
| | heart, brain, | | |
| | nervous system | | |
| Facioscapulohumeral muscular | muscles | | FSHMD1A, FSHD1A, FRG1, |
| dystrophy | | | |
| Factor H and Factor H-like 1 | blood | | HF1, CFH, HUS |
| Factor V Leiden thrombophilia | blood | | Factor V (F5) |
| and Factor V deficiency | | | |
| Factor V and Factor VII | blood | | MCFD2 |
| deficiency | | | |
| Factor VII deficiency | blood | | F7 |
| Factor X deficiency | blood | | F10 |
| Factor XI deficiency | blood | | F11 |
| Factor XII deficiency | blood | | F12, HAF |
| Factor XIIIA deficiency | blood | | F13A1, F13A |
| Factor XIIIB deficiency | blood | | F13B |
| Familial Hypercholestereolemia | Cardiovascular | | APOB, LDLR, PCSK9 |
| | system | | |
| Familial Mediterranean Fever | Various- | Heart, kidney, | MEFV |
| (FMF) also called recurrent | organs/tissues | brain/CNS, | |
| polyserositis or familial | with serous or | reproductive | |
| paroxysmal polyserositis | synovial | organs | |
| | membranes, | | |
| | skin, joints | | |
| Fanconi Anemia | Various-blood | | FANCA, FACA, FA1, FA, FAA, |
| | (anemia), | | FAAP95, FAAP90, FLJ34064, |
| | immune system, | | FANCC, FANCG, RAD51, BRCA1, |
| | cognitive, | | BRCA2, BRIP1, BACH1, FANCJ, |
| | kidneys, eyes, | | FANCB, FANCD1, FANCD2, |
| | musculoskeletal | | FANCD, FAD, FANCE, FACE, |
| | | | FANCF, FANCI, ERCC4, FANCL, |
| | | | FANCM, PALB2, RAD51C, SLX4, |
| | | | UBE2T, FANCB, XRCC9, PHF9, |
| | | | KIAA1596 |
| Fanconi Syndrome Types I | kidneys | | FRTS1, GATM |
| (Childhood onset) and II (Adult | | | |
| Onset) | | | |
| Fragile X syndrome and related | brain | | FMR1, FMR2; FXR1; FXR2; |
| disorders | | | mGLUR5 |
| Fragile XE Mental Retardation | Brain, nervous | | FMR1 |
| (aka Martin Bell syndrome) | system | | |
| Friedreich Ataxia (FRDA) | Brain, nervous | heart | FXN/X25 |
| | system | | |
| Fuchs endothelial corneal | Eye | | TCF4; COL8A2 |
| dystrophy | | | |
| Galactosemia | Carbohydrate | Various-where | GALT, GALK1, and GALE |
| | metabolism | galactose | |
| | disorder | accumulates- | |
| | | liver, brain, eyes | |
| Gastrointestinal Epithelial | | | CISH |
| Cancer, GI cancer | | | |
| Gaucher Disease (Types 1, 2, | Fat metabolism | Various-liver, | GBA |
| and 3, as well as other unusual | disorder | spleen, blood, | |
| forms that may not fit into these | | CNS, skeletal | |
| types) | | system | |
| Griscelli syndrome | | | |
| Glaucoma | eye | | MYOC, TIGR, GLC1A, JOAG, |
| | | | GPOA, OPTN, GLC1E, FIP2, HYPL, |
| | | | NRP, CYP1B1, GLC3A, OPA1, |
| | | | NTG, NPG, CYP1B1, GLC3A, those |
| | | | described in WO2015153780 |
| Glomerulo sclerosis | kidney | | CC chemokine ligand 2 |
| Glycogen Storage Diseases | Metabolism | | SLC2A2, GLUT2, G6PC, G6PT, |
| Types I-VI-See also Cori's | Diseases | | G6PT1, GAA, LAMP2, LAMPB, |
| Disease, Pompe's Disease, | | | AGL, GDE, GBE1, GYS2, PYGL, |
| McArdle's disease, Hers | | | PFKM, see also Cori's Disease, |
| Disease, and Von Gierke's | | | Pompe's Disease, McArdle's disease, |
| disease | | | Hers Disease, and Von Gierke's |
| | | | disease |
| RBC Glycolytic enzyme | blood | | any mutations in a gene for an |
| deficiency | | | enzyme in the glycolysis pathway |
| | | | including mutations in genes for |
| | | | hexokinases I and II, glucokinase, |
| | | | phosphoglucose isomerase, |
| | | | phosphofructokinase, aldolase Bm |
| | | | triosephosphate isomerease, |
| | | | glyceraldehydee-3-phosphate |
| | | | dehydrogenase, |
| | | | phosphoglycerokinase, |
| | | | phosphoglycerate mutase, enolase I, |
| | | | pyruvate kinase |
| Hartnup's disease | Malabsorption | Various-brain, | SLC6A19 |
| | disease | gastrointestinal, | |
| | | skin. | |
| Hearing Loss | ear | | NOX3, Hes5, BDNF, |
| Hemochromatosis (HH) | Iron absorption | Various-wherever | HFE and H63D |
| | regulation | iron accumulates, | |
| | disease | liver, heart, | |
| | | pancreas, joints, | |
| | | pituitary gland | |
| Hemophagocytic | blood | | PRF1, HPLH2, UNC13D, MUNC13- |
| lymphohistiocytosis disorders | | | 4, HPLH3, HLH3, FHL3 |
| Hemorrhagic disorders | blood | | PI, ATT, F5 |
| Hers disease (Glycogen storage | liver | muscle | PYGL |
| disease Type VI) | | | |
| Hereditary angioedema (HAE) | | | kalikrein B1 |
| Hereditary Hemorrhagic | Skin and | | ACVRL1, ENG and SMAD4 |
| Telangiectasia (Osler-Weber- | mucous | | |
| Rendu Syndrome) | membranes | | |
| Hereditary Spherocytosis | blood | | NK1, EPB42, SLC4A1, SPTA1, and |
| | | | SPTB |
| Hereditary Persistence of Fetal | blood | | HBG1, HBG2, BCL11A, promoter |
| Hemoglobin | | | region of HBG 1 and/or 2 (in the |
| | | | CCAAT box) |
| Hemophilia (hemophilia A | blood | | A: FVIII, F8C, HEMA |
| (Classic) a B (aka Christmas | | | B: FVIX, HEMB |
| disease) and C) | | | C: F9, F11 |
| Hepatic adenoma | liver | | TCF1, HNF1A, MODY3 |
| Hepatic failure, early onset, and | liver | | SCOD1, SCO1 |
| neurologic disorder | | | |
| Hepatic lipase deficiency | liver | | LIPC |
| Hepatoblastoma, cancer and | liver | | CTNNB1, PDGFRL, PDGRL, |
| carcinomas | | | PRLTS, AXIN1, AXIN, CTNNB1, |
| | | | TP53, P53, LFS1, IGF2R, MPRI, |
| | | | MET, CASP8, MCH5 |
| Hermansky-Pudlak syndrome | Skin, eyes, | | HPS1, HPS3, HPS4, HPS5, HPS6, |
| | blood, lung, | | HPS7, DTNBP1, BLOC1, BLOC1S2, |
| | kidneys, | | BLOC3 |
| | intestine | | |
| HIV susceptibility or infection | Immune system | | IL10, CSIF, CMKBR2, CCR2, |
| | | | CMKBR5, CCCKR5 (CCR5), those |
| | | | in WO2015148670A1 |
| Holoprosencephaly (HPE) | brain | | ACVRL1, ENG, SMAD4 |
| (Alobar, Semilobar, and Lobar) | | | |
| Homocystinuria | Metabolic | Various- | CBS, MTHFR, MTR, MTRR, and |
| | disease | connective tissue, | MMADHC |
| | | muscles, CNS, | |
| | | cardiovascular | |
| | | system | |
| HPV | | | HPV16 and HPV18 E6/E7 |
| HSV1, HSV2, and related | eye | | HSV1 genes (immediate early and |
| keratitis | | | late HSV-1 genes (UL1, 1.5, 5, 6, 8, |
| | | | 9, 12, 15, 16, 18, 19, 22, 23, 26, 26.5, |
| | | | 27, 28, 29, 30, 31, 32, 33, 34, 35, 36, |
| | | | 37, 38, 42, 48, 49.5, 50, 52, 54, S6, |
| | | | RL2, RS1, those described in |
| | | | WO2015153789, WO2015153791 |
| Hunter's Syndrome (aka | Lysosomal | Various-liver, | IDS |
| Mucopolysaccharidosis type II) | storage disease | spleen, eye, joint, | |
| | | heart, brain, | |
| | | skeletal | |
| Huntington's disease (HD) and | Brain, nervous | | HD, HTT, IT15, PRNP, PRIP, JPH3, |
| HD-like disorders | system | | JP3, HDL2, TBP, SCA17, PRKCE; |
| | | | IGF1; EP300; RCOR1; PRKCZ; |
| | | | HDAC4; and TGM2, and those |
| | | | described in WO2013130824, |
| | | | WO2015089354 |
| Hurler's Syndrome (aka | Lysosomal | Various-liver, | IDUA, α-L-iduronidase |
| mucopolysaccharidosis type I H, | storage disease | spleen, eye, joint, | |
| MPS IH) | | heart, brain, | |
| | | skeletal | |
| Hurler-Scheie syndrome (aka | Lysosomal | Various-liver, | IDUA, α-L-iduronidase |
| mucopolysaccharidosis type I H- | storage disease | spleen, eye, joint, | |
| S, MPS I H-S) | | heart, brain, | |
| | | skeletal | |
| hyaluronidase deficiency (aka | Soft and | | HYAL1 |
| MPS IX) | connective | | |
| | tissues | | |
| Hyper IgM syndrome | Immune system | | CD40L |
| Hyper-tension caused renal | kidney | | Mineral corticoid receptor |
| damage | | | |
| Immunodeficiencies | Immune System | | CD3E, CD3G, AICDA, AID, |
| | | | HIGM2, TNFRSF5, CD40, UNG, |
| | | | DGU, HIGM4, TNFSF5, CD40LG, |
| | | | HIGM1, IGM, FOXP3, IPEX, AIID, |
| | | | XPID, PIDX, TNFRSF14B, TACI |
| Inborn errors of metabolism: | Metabolism | Various organs | See also: Carbohydrate metabolism |
| including urea cycle disorders, | diseases, liver | and cells | disorders (e.g. galactosemia), Amino |
| organic acidemias), fatty acid | | | acid Metabolism disorders (e.g. |
| oxidation defects, amino | | | phenylketonuria), Fatty acid |
| acidopathies, carbohydrate | | | metabolism (e.g. MCAD deficiency), |
| disorders, mitochondrial | | | Urea Cycle disorders (e.g. |
| disorders | | | Citrullinemia), Organic acidemias |
| | | | (e.g. Maple Syrup Urine disease), |
| | | | Mitochondrial disorders (e.g. |
| | | | MELAS), peroxisomal disorders (e.g. |
| | | | Zellweger syndrome) |
| Inflammation | Various | | IL-10; IL-1 (IL-1a; IL-1b); IL-13; IL- |
| | | | 17 (IL-17a (CTLA8); IL- |
| | | | 17b; IL-17c; IL-17d; IL-17f); II-23; |
| | | | Cx3cr1; ptpn22; TNFa; |
| | | | NOD2/CARD15 for IBD; IL-6; IL-12 |
| | | | (IL-12a; IL-12b); |
| | | | CTLA4; Cx3cl1 |
| Inflammatory Bowel Diseases | Gastrointestinal | Joints, skin | NOD2, IRGM, LRRK2, ATG5, |
| (e.g. Ulcerative Colitis and | | | ATG16L1, IRGM, GATM, ECM1, |
| Chron's Disease) | | | CDH1, LAMB1, HNF4A, GNA12, |
| | | | IL10, CARD9/15. CCR6, IL2RA, |
| | | | MST1, TNFSF15, REL, STAT3, |
| | | | IL23R, IL12B, FUT2 |
| Interstitial renal fibrosis | kidney | | TGF-β type II receptor |
| Job's Syndrome (aka Hyper IgE | Immune System | | STAT3, DOCK8 |
| Syndrome) | | | |
| Juvenile Retinoschisis | eye | | RS1, XLRS1 |
| Kabuki Syndrome 1 | | | MLL4, KMT2D |
| Kennedy Disease (aka | Muscles, brain, | | SBMA/SMAX1/AR |
| Spinobulbar Muscular Atrophy) | nervous system | | |
| Klinefelter syndrome | Various- | | Extra X chromosome in males |
| | particularly | | |
| | those involved | | |
| | in development | | |
| | of male | | |
| | characteristics | | |
| Lafora Disease | Brain, CNS | | EMP2A and EMP2B |
| Leber Congenital Amaurosis | eye | | CRB1, RP12, CORD2, CRD, CRX, |
| | | | IMPDH1, OTX2, AIPL1, CABP4, |
| | | | CCT2, CEP290, CLUAP1, CRB1, |
| | | | CRX, DTHD1, GDF6, GUCY2D, |
| | | | IFT140, IQCB1, KCNJ13, LCA5, |
| | | | LRAT, NMNAT1, PRPH2, RD3, |
| | | | RDH12, RPE65, RP20, RPGRIP1, |
| | | | SPATA7, TULP1, LCA1, LCA4, |
| | | | GUC2D, CORD6, LCA3, |
| Lesch-Nyhan Syndrome | Metabolism | Various-joints, | HPRT1 |
| | disease | cognitive, brain, | |
| | | nervous system | |
| Leukocyte deficiencies and | blood | | ITGB2, CD18, LCAMB, LAD, |
| disorders | | | EIF2B1, EIF2BA, EIF2B2, EIF2B3, |
| | | | EIF2B5, LVWM, CACH, CLE, |
| | | | EIF2B4 |
| Leukemia | Blood | | TAL1, TCL5, SCL, TAL2, FLT3, |
| | | | NBS1, NBS, ZNFN1A1, IK1, LYF1, |
| | | | HOXD4, HOX4B, BCR, CML, PHL, |
| | | | ALL, ARNT, KRAS2, RASK2, |
| | | | GMPS, AF10, ARHGEF12, LARG, |
| | | | KIAA0382, CALM, CLTH, CEBPA, |
| | | | CEBP, CHIC2, BTL, FLT3, KIT, |
| | | | PBT, LPP, NPM1, NUP214, D9S46E, |
| | | | CAN, CAIN, RUNX1, CBFA2, |
| | | | AML1, WHSC1L1, NSD3, FLT3, |
| | | | AF1Q, NPM1, NUMA1, ZNF145, |
| | | | PLZF, PML, MYL, STAT5B, AF10, |
| | | | CALM, CLTH, ARL11, ARLTS1, |
| | | | P2RX7, P2X7, BCR, CML, PHL, |
| | | | ALL, GRAF, NF1, VRNF, WSS, |
| | | | NFNS, PTPN11, PTP2C, SHP2, NS1, |
| | | | BCL2, CCND1, PRAD1, BCL1, |
| | | | TCRA, GATA1, GF1, ERYF1, |
| | | | NFE1, ABL1, NQO1, DIA4, |
| | | | NMOR1, NUP214, D9S46E, CAN, |
| | | | CAIN |
| Limb-girdle muscular dystrophy | muscle | | LGMD |
| diseases | | | |
| Lowe syndrome | brain, eyes, | | OCRL |
| | kidneys | | |
| Lupus glomerulo-nephritis | kidney | | MAPK1 |
| Machado- | Brain, CNS, | | ATX3 |
| Joseph's Disease (also known as | muscle | | |
| Spinocerebellar ataxia Type 3) | | | |
| Macular degeneration | eye | | ABC4, CBC1, CHM1, APOE, |
| | | | C1QTNF5, C2, C3, CCL2, CCR2, |
| | | | CD36, CFB, CFH, CFHR1, CFHR3, |
| | | | CNGB3, CP, CRP, CST3, CTSD, |
| | | | CX3CR1, ELOVL4, ERCC6, |
| | | | FBLN5, FBLN6, FSCN2, HMCN1, |
| | | | HTRA1, IL6, IL8, PLEKHA1, |
| | | | PROM1, PRPH2, RPGR, |
| | | | SERPING1, TCOF1, TIMP3, TLR3 |
| Macular Dystrophy | eye | | BEST1, C1QTNF5, CTNNA1, |
| | | | EFEMP1, ELOVL4, FSCN2, |
| | | | GUCA1B, HMCN1, IMPG1, OTX2, |
| | | | PRDM13, PROM1, PRPH2, RPIL1, |
| | | | TIMP3, ABCA4, CFH, DRAM2, |
| | | | IMG1, MFSD8, ADMD, STGD2, |
| | | | STGD3, RDS, RP7, PRPH, AVMD, |
| | | | AOFMD, VMD2 |
| Malattia Leventinesse | eye | | EFEMP1, FBLN3 |
| Maple Syrup Urine Disease | Metabolism | | BCKDHA, BCKDHB, and DBT |
| | disease | | |
| Marfan syndrome | Connective | Musculoskeletal | FBN1 |
| | tissue | | |
| Maroteaux-Lamy Syndrome | Musculoskeletal | Liver, spleen | ARSB |
| (aka MPS VI) | system, nervous | | |
| | system | | |
| McArdle's Disease (Glycogen | Glycogen | muscle | PYGM |
| Storage Disease Type V) | storage disease | | |
| Medullary cystic kidney disease | kidney | | UMOD, HNFJ, FJHN, MCKD2, |
| | | | ADMCKD2 |
| Metachromatic leukodystrophy | Lysosomal | Nervous system | ARSA |
| | storage disease | | |
| Methylmalonic acidemia | Metabolism | | MMAA, MMAB, MUT, MMACHC, |
| (MMA) | disease | | MMADHC, LMBRD1 |
| Morquio Syndrome (aka MPS | Connective | heart | GALNS |
| IV A and B) | tissue, skin, | | |
| | bone, eyes | | |
| Mucopolysaccharidosis diseases | Lysosomal | | See also Hurler/Scheie syndrome, |
| (Types I H/S, I H, II, III A B and | storage disease- | | Hurler disease, Sanfillipo syndrome, |
| C, I S, IVA and B, IX, VII, and | affects various | | Scheie syndrome, Morquio syndrome, |
| VI) | organs/tissues | | hyaluronidase deficiency, Sly |
| | | | syndrome, and Maroteaux-Lamy |
| | | | syndrome |
| Muscular Atrophy | muscle | | VAPB, VAPC, ALS8, SMN1, SMA1, |
| | | | SMA2, SMA3, SMA4, BSCL2, |
| | | | SPG17, GARS, SMAD1, CMT2D, |
| | | | HEXB, IGHMBP2, SMUBP2, |
| | | | CATF1, SMARD1 |
| Muscular dystrophy | muscle | | FKRP, MDC1C, LGMD2I, LAMA2, |
| | | | LAMM, LARGE, KIAA0609, |
| | | | MDC1D, FCMD, TTID, MYOT, |
| | | | CAPN3, CANP3, DYSF, LGMD2B, |
| | | | SGCG, LGMD2C, DMDA1, SCG3, |
| | | | SGCA, ADL, DAG2, LGMD2D, |
| | | | DMDA2, SGCB, LGMD2E, SGCD, |
| | | | SGD, LGMD2F, CMD1L, TCAP, |
| | | | LGMD2G, CMD1N, TRIM32, |
| | | | HT2A, LGMD2H, FKRP, MDC1C, |
| | | | LGMD2I, TTN, CMD1G, TMD, |
| | | | LGMD2J, POMT1, CAV3, |
| | | | LGMD1C, SEPN1, SELN, RSMD1, |
| | | | PLEC1, PLTN, EBS1 |
| Myotonic dystrophy (Type 1 and | Muscles | Eyes, heart, | CNBP (Type 2) and DMPK (Type 1) |
| Type 2) | | endocrine | |
| Neoplasia | | | PTEN; ATM; ATR; EGFR; ERBB2; |
| | | | ERBB3; ERBB4; |
| | | | Notch1; Notch2; Notch3; Notch4; |
| | | | AKT; AKT2; AKT3; HIF; |
| | | | HIF1a; HIF3a; Met; HRG; Bcl2; |
| | | | PPAR alpha; PPAR |
| | | | gamma; WT1 (Wilms Tumor); FGF |
| | | | Receptor Family |
| | | | members (5 members: 1, 2, 3, 4, 5); |
| | | | CDKN2a; APC; RB |
| | | | (retinoblastoma); MEN1; VHL; |
| | | | BRCA1; BRCA2; AR |
| | | | (Androgen Receptor); TSG101; IGF; |
| | | | IGF Receptor; Igf1 (4 |
| | | | variants); Igf2 (3 variants); Igf 1 |
| | | | Receptor, Igf 2 Receptor; |
| | | | Bax; Bcl2; caspases family (9 |
| | | | members: |
| | | | 1, 2, 3, 4, 6, 7, 8, 9, 12); Kras; Apc |
| Neurofibromatosis (NF) (NF1, | brain, spinal | | NF1, NF2 |
| formerly Recklinghausen's NF, | cord, nerves, | | |
| and NF2) | and skin | | |
| Niemann-Pick Lipidosis (Types | Lysosomal | Various-where | Types A and B: SMPD1; Type C: |
| A, B, and C) | Storage Disease | sphingomyelin | NPC1 or NPC2 |
| | | accumulates, | |
| | | particularly | |
| | | spleen, liver, | |
| | | blood, CNS | |
| Noonan Syndrome | Various- | | PTPN11, SOS1, RAF1 and KRAS |
| | musculoskeletal, | | |
| | heart, eyes, | | |
| | reproductive | | |
| | organs, blood | | |
| Norrie Disease or X-linked | eye | | NDP |
| Familial Exudative | | | |
| Vitreoretinopathy | | | |
| North Carolina Macular | eye | | MCDR1 |
| Dystrophy | | | |
| Osteogenesis imperfecta (OI) | bones, | | COL1A1, COL1A2, CRTAP, P3H |
| (Types I, II, III, IV, V, VI, VII) | musculoskeletal | | |
| Osteopetrosis | bones | | LRP5, BMND1, LRP7, LR3, OPPG, |
| | | | VBCH2, CLCN7, CLC7, OPTA2, |
| | | | OSTM1, GL, TCIRG1, TIRC7, |
| | | | OC116, OPTB1 |
| Patau's Syndrome | Brain, heart, | | Additional copy of chromosome 13 |
| (Trisomy 13) | skeletal system | | |
| Parkinson's disease (PD) | Brain, nervous | | SNCA (PARK1), UCHLI (PARK 5), |
| | system | | and LRRK2 (PARK8), (PARK3), |
| | | | PARK2, PARK4, PARK7 (PARK7), |
| | | | PINK1 (PARK6); x-Synuclein, DJ-1, |
| | | | Parkin, NR4A2, NURR1, NOT, |
| | | | TINUR, SNCAIP, TBP, SCA17, |
| | | | NCAP, PRKN, PDJ, DBH, NDUFV2 |
| Pattern Dystrophy of the RPE | eye | | RDS/peripherin |
| Phenylketonuria (PKU) | Metabolism | Various due to | PAH, PKU1, QDPR, DHPR, PTS |
| | disorder | build-up of | |
| | | phenylalanine, | |
| | | phenyl ketones in | |
| | | tissues and CNS | |
| Polycystic kidney and hepatic | Kidney, liver | | FCYT, PKHD1, ARPKD, PKD1, |
| disease | | | PKD2, PKD4, PKDTS, PRKCSH, |
| | | | G19P1, PCLD, SEC63 |
| Pompe's Disease | Glycogen | Various-heart, | GAA |
| | storage disease | liver, spleen | |
| Porphyria (actually refers to a | Various- | | ALAD, ALAS2, CPOX, FECH, |
| group of different diseases all | wherever heme | | HMBS, PPOX, UROD, or UROS |
| having a specific heme | precursors | | |
| production process abnormality) | accumulate | | |
| posterior polymorphous corneal | eyes | | TCF4; COL8A2 |
| dystrophy | | | |
| Primary Hyperoxaluria (e.g. type | Various-eyes, | | LDHA (lactate dehydrogenase A) and |
| 1) | heart, kidneys, | | hydroxyacid oxidase 1 (HAO1) |
| | skeletal system | | |
| Primary Open Angle Glaucoma | eyes | | MYOC |
| (POAG) | | | |
| Primary sclerosing cholangitis | Liver, | | TCF4; COL8A2 |
| | gallbladder | | |
| Progeria (also called | A11 | | LMNA |
| Hutchinson-Gilford progeria | | | |
| syndrome) | | | |
| Prader-Willi Syndrome | Musculoskeletal | | Deletion of region of short arm of |
| | system, brain, | | chromosome 15, including UBE3A |
| | reproductive | | |
| | and endocrine | | |
| | system | | |
| Prostate Cancer | prostate | | HOXB13, MSMB, GPRC6A, TP53 |
| Pyruvate Dehydrogenase | Brain, nervous | | PDHA1 |
| Deficiency | system | | |
| Kidney/Renal carcinoma | kidney | | RLIP76, VEGF |
| Rett Syndrome | Brain | | MECP2, RTT, PPMX, MRX16, |
| | | | MRX79, CDKL5, STK9, MECP2, |
| | | | RTT, PPMX, MRX16, MRX79, x- |
| | | | Synuclein, DJ-1 |
| Retinitis pigmentosa (RP) | eye | | ADIPOR1, ABCA4, AGBL5, |
| | | | ARHGEF18, ARL2BP, ARL3, |
| | | | ARL6, BEST1, BBS1, BBS2, |
| | | | C2ORF71, C8ORF37, CA4, CERKL, |
| | | | CLRN1, CNGA1, CMGB1, CRB1, |
| | | | CRX, CYP4V2, DHDDS, DHX38, |
| | | | EMC1, EYS, FAM161A, FSCN2, |
| | | | GPR125, GUCA1B, HK1, HPRPF3, |
| | | | HGSNAT, IDH3B, IMPDH1, |
| | | | IMPG2, IFT140, IFT172, KLHL7, |
| | | | KIAA1549, KIZ, LRAT, MAK, |
| | | | MERTK, MVK, NEK2, NUROD1, |
| | | | NR2E3, NRL, OFD1, PDE6A, |
| | | | PDE6B, PDE6G, POMGNT1, PRCD, |
| | | | PROM1, PRPF3, PRPF4, PRPF6, |
| | | | PRPF8, PRPF31, PRPH2, RPB3, |
| | | | RDH12, REEP6, RP39, RGR, RHO, |
| | | | RLBP1, ROM1, RP1, RP1L1, RPY, |
| | | | RP2, RP9, RPE65, RPGR, SAMD11, |
| | | | SAG, SEMA4A, SLC7A14, |
| | | | SNRNP200, SPP2, SPATA7, |
| | | | TRNT1, TOPORS, TTC8, TULP1, |
| | | | USH2A, ZFN408, ZNF513, see also |
| | | | 20120204282 |
| Scheie syndrome (also known as | Various-liver, | | IDUA, α-L-iduronidase |
| mucopolysaccharidosis type I | spleen, eye, | | |
| S(MPS I-S)) | joint, heart, | | |
| | brain, skeletal | | |
| Schizophrenia | Brain | | Neuregulin1 (Nrg1); Erb4 (receptor |
| | | | for Neuregulin); |
| | | | Complexin1 (Cplx1); Tph1 |
| | | | Tryptophan hydroxylase; Tph2 |
| | | | Tryptophan hydroxylase 2; Neurexin |
| | | | 1; GSK3; GSK3a; |
| | | | GSK3b; 5-HTT (Slc6a4); COMT; |
| | | | DRD (Drd1a); SLC6A3; DAOA; |
| | | | DTNBP1; Dao (Dao1); TCF4; |
| | | | COL8A2 |
| Secretase Related Disorders | Various | | APH-1 (alpha and beta); PSEN1; |
| | | | NCSTN; PEN-2; Nos1, Parp1, Nat1, |
| | | | Nat2, CTSB, APP, APH1B, PSEN2, |
| | | | PSENEN, BACE1, ITM2B, CTSD, |
| | | | NOTCH1, TNF, INS, DYT10, |
| | | | ADAM17, APOE, ACE, STN, TP53, |
| | | | IL6, NGFR, IL1B, ACHE, CTNNB1, |
| | | | IGF1, IFNG, NRG1, CASP3, |
| | | | MAPK1, CDH1, APBB1, HMGCR, |
| | | | CREB1, PTGS2, HES1, CAT, |
| | | | TGFB1, ENO2, ERBB4, TRAPPC10, |
| | | | MAOB, NGF, MMP12, JAG1, |
| | | | CD40LG, PPARG, FGF2, LRP1, |
| | | | NOTCH4, MAPK8, PREP, |
| | | | NOTCH3, PRNP, CTSG, EGF, REN, |
| | | | CD44, SELP, GHR, ADCYAP1, |
| | | | INSR, GFAP, MMP3, MAPK10, |
| | | | SP1, MYC, CTSE, PPARA, JUN, |
| | | | TIMP1, IL5, IL1A, MMP9, HTR4, |
| | | | HSPG2, KRAS, CYCS, SMG1, |
| | | | IL1R1, PROK1, MAPK3, NTRK1, |
| | | | IL13, MME, TKT, CXCR2, CHRM1, |
| | | | ATXN1, PAWR, NOTCJ2, M6PR, |
| | | | CYP46A1, CSNK1D, MAPK14, |
| | | | PRG2, PRKCA, L1 CAM, CD40, |
| | | | NR1I2, JAG2, CTNND1, CMA1, |
| | | | SORT1, DLK1, THEM4, JUP, CD46, |
| | | | CCL11, CAV3, RNASE3, HSPA8, |
| | | | CASP9, CYP3A4, CCR3, TFAP2A, |
| | | | SCP2, CDK4, JOF1A, TCF7L2, |
| | | | B3GALTL, MDM2, RELA, CASP7, |
| | | | IDE, FANP4, CASK, ADCYAP1R1, |
| | | | ATF4, PDGFA, C21ORF33, SCG5, |
| | | | RMF123, NKFB1, ERBB2, CAV1, |
| | | | MMP7, TGFA, RXRA, STX1A, |
| | | | PSMC4, P2RY2, TNFRSF21, DLG1, |
| | | | NUMBL, SPN, PLSCR1, UBQLN2, |
| | | | UBQLN1, PCSK7, SPON1, SILV, |
| | | | QPCT, HESS, GCC1 |
| Selective IgA Deficiency | Immune system | | Type 1: MSH5; Type 2: TNFRSF13B |
| Severe Combined | Immune system | | JAK3, JAKL, DCLRE1C, ARTEMIS, |
| Immunodeficiency (SCID) and | | | SCIDA, RAG1, RAG2, ADA, |
| SCID-X1, and ADA-SCID | | | PTPRC, CD45, LCA, IL7R, CD3D, |
| | | | T3D, IL2RG, SCIDX1, SCIDX, |
| | | | IMD4, those identified in US Pat. |
| | | | App. Pub. 20110225664, |
| | | | 20110091441, 20100229252, |
| | | | 20090271881 and 20090222937; |
| Sickle cell disease | blood | | HBB, BCL11A, BCL11Ae, cis- |
| | | | regulatory elements of the B-globin |
| | | | locus, HBG ½ promoter, HBG distal |
| | | | CCAAT box region between-92 and |
| | | | -130 of the HBG Transcription Start |
| | | | Site, those described in |
| | | | WO2015148863, WO 2013/126794, |
| | | | US Pat. Pub. 20110182867 |
| Sly Syndrome (aka MPS VII) | | | GUSB |
| Spinocerebellar Ataxias (SCA | | | ATXN1, ATXN2, ATX3 |
| types 1, 2, 3, 6, 7, 8, 12 and 17) | | | |
| Sorsby Fundus Dystrophy | eye | | TIMP3 |
| Stargardt disease | eye | | ABCR, ELOVL4, ABCA4, PROM1 |
| Tay-Sachs Disease | Lysosomal | Various-CNS, | HEX-A |
| | Storage disease | brain, eye | |
| Thalassemia (Alpha, Beta, | blood | | HBA1, HBA2 (Alpha), HBB (Beta), |
| Delta) | | | HBB and HBD (delta), LCRB, |
| | | | BCL11A, BCL11Ae, cis-regulatory |
| | | | elements of the B-globin locus, HBG |
| | | | ½ promoter, those described in |
| | | | WO2015148860, US Pat. Pub. |
| | | | 20110182867, 2015/148860 |
| Thymic Aplasia (DiGeorge | Immune system, | | deletion of 30 to 40 genes in the |
| Syndrome; 22q11.2 deletion | thymus | | middle of chromosome 22 at |
| syndrome) | | | a location known as 22q11.2, |
| | | | including TBX1, DGCR8 |
| Transthyretin amyloidosis | liver | | TTR (transthyretin) |
| (ATTR) | | | |
| trimethylaminuria | Metabolism | | FMO3 |
| | disease | | |
| Trinucleotide Repeat Disorders | Various | | HTT; SBMA/SMAX1/AR; |
| (generally) | | | FXN/X25 ATX3; |
| | | | ATXN1; ATXN2; |
| | | | DMPK; Atrophin-1 and Atn1 |
| | | | (DRPLA Dx); CBP (Creb-BP-global |
| | | | instability); VLDLR; Atxn7; Atxn10; |
| | | | FEN1, TNRC6A, PABPN1, JPH3, |
| | | | MED15, ATXN1, ATXN3, TBP, |
| | | | CACNA1A, ATXN80S, PPP2R2B, |
| | | | ATXN7, TNRC6B, TNRC6C, |
| | | | CELF3, MAB21L1, MSH2, |
| | | | TMEM185A, SIX5, CNPY3, RAXE, |
| | | | GNB2, RPL14, ATXN8, ISR, TTR, |
| | | | EP400, GIGYF2, OGG1, STC1, |
| | | | CNDP1, C10ORF2, MAML3, DKC1, |
| | | | PAXIP1, CASK, MAPT, SP1, POLG, |
| | | | AFF2, THBS1, TP53, ESR1, |
| | | | CGGBP1, ABT1, KLK3, PRNP, |
| | | | JUN, KCNN3, BAX, FRAXA, |
| | | | KBTBD10, MBNL1, RAD51, |
| | | | NCOA3, ERDA1, TSC1, COMP, |
| | | | GGLC, RRAD, MSH3, DRD2, |
| | | | CD44, CTCF, CCND1, CLSPN, |
| | | | MEF2A, PTPRU, GAPDH, TRIM22, |
| | | | WT1, AHR, GPX1, TPMT, NDP, |
| | | | ARX, TYR, EGR1, UNG, NUMBL, |
| | | | FABP2, EN2, CRYGC, SRP14, |
| | | | CRYGB, PDCD1, HOXA1, |
| | | | ATXN2L, PMS2, GLA, CBL, FTH1, |
| | | | IL12RB2, OTX2, HOXA5, POLG2, |
| | | | DLX2, AHRR, MANF, RMEM158, |
| | | | see also 20110016540 |
| Turner's Syndrome (XO) | Various- | | Monosomy X |
| | reproductive | | |
| | organs, and sex | | |
| | characteristics, | | |
| | vasculature | | |
| Tuberous Sclerosis | CNS, heart, | | TSC1, TSC2 |
| | kidneys | | |
| Usher syndrome (Types I, II, and | Ears, eyes | | ABHD12, CDH23, CIB2, CLRN1, |
| III) | | | DFNB31, GPR98, HARS, MYO7A, |
| | | | PCDH15, USH1C, USH1G, USH2A, |
| | | | USH11A, those described in |
| | | | WO2015134812A1 |
| Velocardiofacial syndrome (aka | Various- | | Many genes are deleted, COM, |
| 22q11.2 deletion syndrome, | skeletal, heart, | | TBX1, and other are associated with |
| DiGeorge syndrome, | kidney, immune | | symptoms |
| conotruncal anomaly face | system, brain | | |
| syndrome (CTAF), autosomal | | | |
| dominant Opitz G/BB syndrome | | | |
| or Cayler cardiofacial syndrome) | | | |
| Von Gierke's Disease (Glycogen | Glycogen | Various-liver, | G6PC and SLC37A4 |
| Storage Disease type I) | Storage disease | kidney | |
| Von Hippel-Lindau Syndrome | Various-cell | CNS, Kidney, | VHL |
| | growth | Eye, visceral | |
| | regulation | organs | |
| | disorder | | |
| Von Willebrand Disease (Types | blood | | VWF |
| I, II and III) | | | |
| Wilson Disease | Various- | Liver, brains, | ATP7B |
| | Copper Storage | eyes, other tissues | |
| | Disease | where copper | |
| | | builds up | |
| Wiskott-Aldrich Syndrome | Immune System | | WAS |
| Xeroderma Pigmentosum | Skin | Nervous system | POLH |
| XXX Syndrome | Endocrine, brain | | X chromosome trisomy |

[0845] In one embodiment, the compositions, systems, or components thereof can be used treat or prevent a disease in a subject by modifying one or more genes associated with one or more cellular functions, such as any one or more of those in Table 7. In one embodiment, the disease is a genetic disease or disorder. In some of embodiments, the composition, system, or component thereof can modify one or more genes or polynucleotides associated with one or more genetic diseases such as any set forth in Table 7.

TABLE 7
Exemplary Genes controlling Cellular Functions

| CELLULAR FUNCTION | GENES |
|---|---|
| PI3K/AKT Signaling | PRKCE; ITGAM; ITGA5; IRAK1; PRKAA2; EIF2AK2;PTEN; EIF4E; |
| | PRKCZ; GRK6; MAPK1; TSC1; PLK1; AKT2; IKBKB; PIK3CA; CDK8; |
| | CDKN1B; NFKB2; BCL2;PIK3CB; PPP2R1A; MAPK8; BCL2L1; MAPK3; |
| | TSC2; |
| | ITGA1; KRAS; EIF4EBP1; RELA; PRKCD; NOS3; |
| | PRKAA1; MAPK9; CDK2; PPP2CA; PIM1; ITGB7; |
| | YWHAZ; ILK; TP53; RAF1; IKBKG; RELB; DYRK1A; |
| | CDKN1A; ITGB1; MAP2K2; JAK1; AKT1; JAK2; PIK3R1; |
| | CHUK; PDPK1; PPP2R5C; CTNNB1; MAP2K1; NFKB1; |
| | PAK3; ITGB3; CCND1; GSK3A; FRAP1; SFN; ITGA2; |
| | TTK; CSNK1A1; BRAF; GSK3B; AKT3; FOXO1; SGK; |
| | HSP90AA1; RPS6KB1 |
| ERK/MAPK Signaling | PRKCE; ITGAM; ITGA5; HSPB1; IRAK1; PRKAA2; |
| | EIF2AK2; RAC1; RAP1A; TLN1; EIF4E; ELK1; GRK6; |
| | MAPK1; RAC2; PLK1; AKT2; PIK3CA; CDK8; CREB1; |
| | PRKCI; PTK2; FOS; RPS6KA4; PIK3CB; PPP2R1A; |
| | PIK3C3; MAPK8; MAPK3; ITGA1; ETS1; KRAS; MYCN; |
| | EIF4EBP1; PPARG; PRKCD; PRKAA1; MAPK9; SRC; |
| | CDK2; PPP2CA; PIM1; PIK3C2A; ITGB7; YWHAZ; |
| | PPP1CC; KSR1; PXN; RAF1; FYN; DYRK1A; ITGB1; |
| | MAP2K2; PAK4; PIK3R1; STAT3; PPP2R5C; MAP2K1; |
| | PAK3; ITGB3; ESR1; ITGA2; MYC; TTK; CSNK1A1; |
| | CRKL; BRAF; ATF4; PRKCA; SRF; STAT1; SGK |
| Glucocorticoid Receptor | RAC1; TAF4B; EP300; SMAD2; TRAF6; PCAF; ELK1; |
| Signaling | MAPK1; SMAD3; AKT2; IKBKB; NCOR2; UBE2I; |
| | PIK3CA; CREB1; FOS; HSPA5; NFKB2; BCL2; |
| | MAP3K14; STAT5B; PIK3CB; PIK3C3; MAPK8; BCL2L1; |
| | MAPK3; TSC22D3; MAPK10; NRIP1; KRAS; MAPK13; |
| | RELA; STAT5A; MAPK9; NOS2A; PBX1; NR3C1; |
| | PIK3C2A; CDKN1C; TRAF2; SERPINE1; NCOA3; |
| | MAPK14; TNF; RAF1; IKBKG; MAP3K7; CREBBP; |
| | CDKN1A; MAP2K2; JAK1; IL8; NCOA2; AKT1; JAK2; |
| | PIK3R1; CHUK; STAT3; MAP2K1; NFKB1; TGFBR1; |
| | ESR1; SMAD4; CEBPB; JUN; AR; AKT3; CCL2; MMP1; |
| | STAT1; IL6; HSP90AA1 |
| Axonal Guidance Signaling | PRKCE; ITGAM; ROCK1; ITGA5; CXCR4; ADAM12; |
| | IGF1; RAC1; RAP1A; EIF4E; PRKCZ; NRP1; NTRK2; |
| | ARHGEF7; SMO; ROCK2; MAPK1; PGF; RAC2; |
| | PTPN11; GNAS; AKT2; PIK3CA; ERBB2; PRKCI; PTK2; |
| | CFL1; GNAQ; PIK3CB; CXCL12; PIK3C3; WNT11; |
| | PRKD1; GNB2L1; ABL1; MAPK3; ITGA1; KRAS; RHOA; |
| | PRKCD; PIK3C2A; ITGB7; GLI2; PXN; VASP; RAF1; |
| | FYN; ITGB1; MAP2K2; PAK4; ADAM17; AKT1; PIK3R1; |
| | GLI1; WNT5A; ADAM10; MAP2K1; PAK3; ITGB3; |
| | CDC42; VEGFA; ITGA2; EPHA8; CRKL; RND1; GSK3B; |
| | AKT3; PRKCA |
| Ephrin Receptor Signaling | PRKCE; ITGAM; ROCK1; ITGA5; CXCR4; IRAK1; |
| Actin Cytoskeleton | PRKAA2; EIF2AK2; RAC1; RAP1A; GRK6; ROCK2; |
| | MAPK1; PGF; RAC2; PTPN11; GNAS; PLK1; AKT2; |
| | DOK1; CDK8; CREB1; PTK2; CFL1; GNAQ; MAP3K14; |
| | CXCL12; MAPK8; GNB2L1; ABL1; MAPK3; ITGA1; |
| | KRAS; RHOA; PRKCD; PRKAA1; MAPK9; SRC; CDK2; |
| | PIM1; ITGB7; PXN; RAF1; FYN; DYRK1A; ITGB1; |
| | MAP2K2; PAK4; AKT1; JAK2; STAT3; ADAM10; |
| | MAP2K1; PAK3; ITGB3; CDC42; VEGFA; ITGA2; |
| | EPHA8; TTK; CSNK1A1; CRKL; BRAF; PTPN13; ATF4; |
| | AKT3; SGK |
| Signaling | ACTN4; PRKCE; ITGAM; ROCK1; ITGA5; IRAK1; |
| | PRKAA2; EIF2AK2; RAC1; INS; ARHGEF7; GRK6; |
| | ROCK2; MAPK1; RAC2; PLK1; AKT2; PIK3CA; CDK8; |
| | PTK2; CFL1; PIK3CB; MYH9; DIAPH1; PIK3C3; MAPK8; |
| | F2R; MAPK3; SLC9A1; ITGA1; KRAS; RHOA; PRKCD; |
| | PRKAA1; MAPK9; CDK2; PIM1; PIK3C2A; ITGB7; |
| | PPP1CC; PXN; VIL2; RAF1; GSN; DYRK1A; ITGB1; |
| | MAP2K2; PAK4; PIP5K1A; PIK3R1; MAP2K1; PAK3; |
| | ITGB3; CDC42; APC; ITGA2; TTK; CSNK1A1; CRKL; |
| | BRAF; VAV3; SGK |
| Huntington's Disease | PRKCE; IGF1; EP300; RCOR1; PRKCZ; HDAC4; TGM2; |
| Signaling | MAPK1; CAPNS1; AKT2; EGFR; NCOR2; SP1; CAPN2; |
| | PIK3CA; HDAC5; CREB1; PRKCI; HSPA5; REST; |
| | GNAQ; PIK3CB; PIK3C3; MAPK8; IGF1R; PRKD1; |
| | GNB2L1; BCL2L1; CAPN1; MAPK3; CASP8; HDAC2; |
| | HDAC7A; PRKCD; HDAC11; MAPK9; HDAC9; PIK3C2A; |
| | HDAC3; TP53; CASP9; CREBBP; AKT1; PIK3R1; |
| | PDPK1; CASP1; APAF1; FRAP1; CASP2; JUN; BAX; |
| | ATF4; AKT3; PRKCA; CLTC; SGK; HDAC6; CASP3 |
| Apoptosis Signaling | PRKCE; ROCK1; BID; IRAK1; PRKAA2; EIF2AK2; BAK1; |
| | BIRC4; GRK6; MAPK1; CAPNS1; PLK1; AKT2; IKBKB; |
| | CAPN2; CDK8; FAS; NFKB2; BCL2; MAP3K14; MAPK8; |
| | BCL2L1; CAPN1; MAPK3; CASP8; KRAS; RELA; |
| | PRKCD; PRKAA1; MAPK9; CDK2; PIM1; TP53; TNF; |
| | RAF1; IKBKG; RELB; CASP9; DYRK1A; MAP2K2; |
| | CHUK; APAF1; MAP2K1; NFKB1; PAK3; LMNA; CASP2; |
| | BIRC2; TTK; CSNK1A1; BRAF; BAX; PRKCA; SGK; |
| | CASP3; BIRC3; PARP1 |
| B Cell Receptor Signaling | RAC1; PTEN; LYN; ELK1; MAPK1; RAC2; PTPN11; |
| | AKT2; IKBKB; PIK3CA; CREB1; SYK; NFKB2; CAMK2A; |
| | MAP3K14; PIK3CB; PIK3C3; MAPK8; BCL2L1; ABL1; |
| | MAPK3; ETS1; KRAS; MAPK13; RELA; PTPN6; MAPK9; |
| | EGR1; PIK3C2A; BTK; MAPK14; RAF1; IKBKG; RELB; |
| | MAP3K7; MAP2K2; AKT1; PIK3R1; CHUK; MAP2K1; |
| | NFKB1; CDC42; GSK3A; FRAP1; BCL6; BCL10; JUN; |
| | GSK3B; ATF4; AKT3; VAV3; RPS6KB1 |
| Leukocyte Extravasation | ACTN4; CD44; PRKCE; ITGAM; ROCK1; CXCR4; CYBA; |
| Signaling | RAC1; RAP1A; PRKCZ; ROCK2; RAC2; PTPN11; |
| | MMP14; PIK3CA; PRKC1; PTK2; PIK3CB; CXCL12; |
| | PIK3C3; MAPK8; PRKD1; ABL1; MAPK10; CYBB; |
| | MAPK13; RHOA; PRKCD; MAPK9; SRC; PIK3C2A; BTK; |
| | MAPK14; NOX1; PXN; VIL2; VASP; ITGB1; MAP2K2; |
| | CTNND1; PIK3R1; CTNNB1; CLDN1; CDC42; F11R; ITK; |
| | CRKL; VAV3; CTTN; PRKCA; MMP1; MMP9 |
| Integrin Signaling | ACTN4; ITGAM; ROCK1; ITGA5; RAC1; PTEN; RAP1A; |
| | TLN1; ARHGEF7; MAPK1; RAC2; CAPNS1; AKT2; |
| | CAPN2; PIK3CA; PTK2; PIK3CB; PIK3C3; MAPK8; |
| | CAV1; CAPN1; ABL1; MAPK3; ITGA1; KRAS; RHOA; |
| | SRC; PIK3C2A; ITGB7; PPP1CC; ILK; PXN; VASP; |
| | RAF1; FYN; ITGB1; MAP2K2; PAK4; AKT1; PIK3R1; |
| | TNK2; MAP2K1; PAK3; ITGB3; CDC42; RND3; ITGA2; |
| | CRKL; BRAF; GSK3B; AKT3 |
| Acute Phase Response | IRAK1; SOD2; MYD88; TRAF6; ELK1; MAPK1; PTPN11; |
| Signaling | AKT2; IKBKB; PIK3CA; FOS; NFKB2; MAP3K14; |
| | PIK3CB; MAPK8; RIPK1; MAPK3; IL6ST; KRAS; |
| | MAPK13; IL6R; RELA; SOCS1; MAPK9; FTL; NR3C1; |
| | TRAF2; SERPINE1; MAPK14; TNF; RAF1; PDK1; |
| | IKBKG; RELB; MAP3K7; MAP2K2; AKT1; JAK2; PIK3R1; |
| | CHUK; STAT3; MAP2K1; NFKB1; FRAP1; CEBPB; JUN; |
| | AKT3; IL1R1; IL6 |
| PTEN Signaling | ITGAM; ITGA5; RAC1; PTEN; PRKCZ; BCL2L11; |
| | MAPK1; RAC2; AKT2; EGFR; IKBKB; CBL; PIK3CA; |
| | CDKN1B; PTK2; NFKB2; BCL2; PIK3CB; BCL2L1; |
| | MAPK3; ITGA1; KRAS; ITGB7; ILK; PDGFRB; INSR; |
| | RAF1; IKBKG; CASP9; CDKN1A; ITGB1; MAP2K2; |
| | AKT1; PIK3R1; CHUK; PDGFRA; PDPK1; MAP2K1; |
| | NFKB1; ITGB3; CDC42; CCND1; GSK3A; ITGA2; |
| | GSK3B; AKT3; FOXO1; CASP3; RPS6KB1 |
| p53 Signaling | PTEN; EP300; BBC3; PCAF; FASN; BRCA1; GADD45A; |
| Aryl Hydrocarbon Receptor | BIRC5; AKT2; PIK3CA; CHEK1; TP53INP1; BCL2; |
| | PIK3CB; PIK3C3; MAPK8; THBS1; ATR; BCL2L1; E2F1; |
| | PMAIP1; CHEK2; TNFRSF10B; TP73; RB1; HDAC9; |
| | CDK2; PIK3C2A; MAPK14; TP53; LRDD; CDKN1A; |
| | HIPK2; AKT1; PIK3R1; RRM2B; APAF1; CTNNB1; |
| | SIRT1; CCND1; PRKDC; ATM; SFN; CDKN2A; JUN; |
| | SNAI2; GSK3B; BAX; AKT3 |
| Signaling | HSPB1; EP300; FASN; TGM2; RXRA; MAPK1; NQO1; |
| | NCOR2; SP1; ARNT; CDKN1B; FOS; CHEK1; |
| | SMARCA4; NFKB2; MAPK8; ALDH1A1; ATR; E2F1; |
| | MAPK3; NRIP1; CHEK2; RELA; TP73; GSTP1; RB1; |
| | SRC; CDK2; AHR; NFE2L2; NCOA3; TP53; TNF; |
| | CDKN1A; NCOA2; APAF1; NFKB1; CCND1; ATM; ESR1; |
| | CDKN2A; MYC; JUN; ESR2; BAX; IL6; CYP1B1; |
| | HSP90AA1 |
| Xenobiotic Metabolism | PRKCE; EP300; PRKCZ; RXRA; MAPK1; NQO1; |
| Signaling | NCOR2; PIK3CA; ARNT; PRKCI; NFKB2; CAMK2A; |
| | PIK3CB; PPP2R1A; PIK3C3; MAPK8; PRKD1; |
| | ALDH1A1; MAPK3; NRIP1; KRAS; MAPK13; PRKCD; |
| | GSTP1; MAPK9; NOS2A; ABCB1; AHR; PPP2CA; FTL; |
| | NFE2L2; PIK3C2A; PPARGC1A; MAPK14; TNF; RAF1; |
| | CREBBP; MAP2K2; PIK3R1; PPP2R5C; MAP2K1; |
| | NFKB1; KEAP1; PRKCA; EIF2AK3; IL6; CYP1B1; |
| | HSP90AA1 |
| SAPK/JNK Signaling | PRKCE; IRAK1; PRKAA2; EIF2AK2; RAC1; ELK1; |
| | GRK6; MAPK1; GADD45A; RAC2; PLK1; AKT2; PIK3CA; |
| | FADD; CDK8; PIK3CB; PIK3C3; MAPK8; RIPK1; |
| | GNB2L1; IRS1; MAPK3; MAPK10; DAXX; KRAS; |
| | PRKCD; PRKAA1; MAPK9; CDK2; PIM1; PIK3C2A; |
| | TRAF2; TP53; LCK; MAP3K7; DYRK1A; MAP2K2; |
| | PIK3R1; MAP2K1; PAK3; CDC42; JUN; TTK; CSNK1A1; |
| | CRKL; BRAF; SGK |
| PPAr/RXR Signaling | PRKAA2; EP300; INS; SMAD2; TRAF6; PPARA; FASN; |
| | RXRA; MAPK1; SMAD3; GNAS; IKBKB; NCOR2; |
| | ABCA1; GNAQ; NFKB2; MAP3K14; STAT5B; MAPK8; |
| | IRS1; MAPK3; KRAS; RELA; PRKAA1; PPARGC1A; |
| | NCOA3; MAPK14; INSR; RAF1; IKBKG; RELB; MAP3K7; |
| | CREBBP; MAP2K2; JAK2; CHUK; MAP2K1; NFKB1; |
| | TGFBR1; SMAD4; JUN; IL1R1; PRKCA; IL6; HSP90AA1; |
| | ADIPOQ |
| NF-KB Signaling | IRAK1; EIF2AK2; EP300; INS; MYD88; PRKCZ; TRAF6; |
| | TBK1; AKT2; EGFR; IKBKB; PIK3CA; BTRC; NFKB2; |
| | MAP3K14; PIK3CB; PIK3C3; MAPK8; RIPK1; HDAC2; |
| | KRAS; RELA; PIK3C2A; TRAF2; TLR4; PDGFRB; TNF; |
| | INSR; LCK; IKBKG; RELB; MAP3K7; CREBBP; AKT1; |
| | PIK3R1; CHUK; PDGFRA; NFKB1; TLR2; BCL10; |
| | GSK3B; AKT3; TNFAIP3; IL1R1 |
| Neuregulin Signaling | ERBB4; PRKCE; ITGAM; ITGA5; PTEN; PRKCZ; ELK1; |
| Wnt & Beta catenin | MAPK1; PTPN11; AKT2; EGFR; ERBB2; PRKCI; |
| Signaling | CDKN1B; STAT5B; PRKD1; MAPK3; ITGA1; KRAS; |
| | PRKCD; STAT5A; SRC; ITGB7; RAF1; ITGB1; MAP2K2; |
| | ADAM17; AKT1; PIK3R1; PDPK1; MAP2K1; ITGB3; |
| | EREG; FRAP1; PSEN1; ITGA2; MYC; NRG1; CRKL; |
| | AKT3; PRKCA; HSP90AA1; RPS6KB1 |
| | CD44; EP300; LRP6; DVL3; CSNK1E; GJA1; SMO; |
| | AKT2; PIN1; CDH1; BTRC; GNAQ; MARK2; PPP2R1A; |
| | WNT11; SRC; DKK1; PPP2CA; SOX6; SFRP2; ILK; |
| | LEF1; SOX9; TP53; MAP3K7; CREBBP; TCF7L2; AKT1; |
| | PPP2R5C; WNT5A; LRP5; CTNNB1; TGFBR1; CCND1; |
| | GSK3A; DVL1; APC; CDKN2A; MYC; CSNK1A1; GSK3B; |
| | AKT3; SOX2 |
| Insulin Receptor Signaling | PTEN; INS; EIF4E; PTPN1; PRKCZ; MAPK1; TSC1; |
| | PTPN11; AKT2; CBL; PIK3CA; PRKCI; PIK3CB; PIK3C3; |
| | MAPK8; IRS1; MAPK3; TSC2; KRAS; EIF4EBP1; |
| | SLC2A4; PIK3C2A; PPP1CC; INSR; RAF1; FYN; |
| | MAP2K2; JAK1; AKT1; JAK2; PIK3R1; PDPK1; MAP2K1; |
| | GSK3A; FRAP1; CRKL; GSK3B; AKT3; FOXO1; SGK; |
| | RPS6KB1 |
| IL-6 Signaling | HSPB1; TRAF6; MAPKAPK2; ELK1; MAPK1; PTPN11; |
| | IKBKB; FOS; NFKB2; MAP3K14; MAPK8; MAPK3; |
| | MAPK10; IL6ST; KRAS; MAPK13; IL6R; RELA; SOCS1; |
| | MAPK9; ABCB1; TRAF2; MAPK14; TNF; RAF1; IKBKG; |
| | RELB; MAP3K7; MAP2K2; IL8; JAK2; CHUK; STAT3; |
| | MAP2K1; NFKB1; CEBPB; JUN; IL1R1; SRF; IL6 |
| Hepatic Cholestasis | PRKCE; IRAK1; INS; MYD88; PRKCZ; TRAF6; PPARA; |
| | RXRA; IKBKB; PRKCI; NFKB2; MAP3K14; MAPK8; |
| | PRKD1; MAPK10; RELA; PRKCD; MAPK9; ABCB1; |
| | TRAF2; TLR4; TNF; INSR; IKBKG; RELB; MAP3K7; IL8; |
| | CHUK; NR1H2; TJP2; NFKB1; ESR1; SREBF1; FGFR4; |
| | JUN; IL1R1; PRKCA; IL6 |
| IGF-1 Signaling | IGF1; PRKCZ; ELK1; MAPK1; PTPN11; NEDD4; AKT2; |
| | PIK3CA; PRKCI; PTK2; FOS; PIK3CB; PIK3C3; MAPK8; |
| | IGF1R; IRS1; MAPK3; IGFBP7; KRAS; PIK3C2A; |
| | YWHAZ; PXN; RAF1; CASP9; MAP2K2; AKT1; PIK3R1; |
| | PDPK1; MAP2K1; IGFBP2; SFN; JUN; CYR61; AKT3; |
| | FOXO1; SRF; CTGF; RPS6KB1 |
| NRF2-mediated Oxidative | PRKCE; EP300; SOD2; PRKCZ; MAPK1; SQSTM1; |
| Stress Response | NQO1; PIK3CA; PRKCI; FOS; PIK3CB; PIK3C3; MAPK8; |
| | PRKD1; MAPK3; KRAS; PRKCD; GSTP1; MAPK9; FTL; |
| | NFE2L2; PIK3C2A; MAPK14; RAF1; MAP3K7; CREBBP; |
| | MAP2K2; AKT1; PIK3R1; MAP2K1; PPIB; JUN; KEAP1; |
| | GSK3B; ATF4; PRKCA; EIF2AK3; HSP90AA1 |
| Hepatic Fibrosis/Hepatic | EDN1; IGF1; KDR; FLT1; SMAD2; FGFR1; MET; PGF; |
| Stellate Cell Activation | SMAD3; EGFR; FAS; CSF1; NFKB2; BCL2; MYH9; |
| | IGF1R; IL6R; RELA; TLR4; PDGFRB; TNF; RELB; IL8; |
| | PDGFRA; NFKB1; TGFBR1; SMAD4; VEGFA; BAX; |
| | IL1R1; CCL2; HGF; MMP1; STAT1; IL6; CTGF; MMP9 |
| PPAR Signaling | EP300; INS; TRAF6; PPARA; RXRA; MAPK1; IKBKB; |
| | NCOR2; FOS; NFKB2; MAP3K14; STAT5B; MAPK3; |
| | NRIP1; KRAS; PPARG; RELA; STAT5A; TRAF2; |
| | PPARGC1A; PDGFRB; TNF; INSR; RAF1; IKBKG; |
| | RELB; MAP3K7; CREBBP; MAP2K2; CHUK; PDGFRA; |
| | MAP2K1; NFKB1; JUN; IL1R1; HSP90AA1 |
| Fc Epsilon RI Signaling | PRKCE; RAC1; PRKCZ; LYN; MAPK1; RAC2; PTPN11; |
| | AKT2; PIK3CA; SYK; PRKCI; PIK3CB; PIK3C3; MAPK8; |
| | PRKD1; MAPK3; MAPK10; KRAS; MAPK13; PRKCD; |
| | MAPK9; PIK3C2A; BTK; MAPK14; TNF; RAF1; FYN; |
| | MAP2K2; AKT1; PIK3R1; PDPK1; MAP2K1; AKT3; |
| | VAV3; PRKCA |
| G-Protein Coupled | PRKCE; RAP1A; RGS16; MAPK1; GNAS; AKT2; IKBKB; |
| Receptor Signaling | PIK3CA; CREB1; GNAQ; NFKB2; CAMK2A; PIK3CB; |
| | PIK3C3; MAPK3; KRAS; RELA; SRC; PIK3C2A; RAF1; |
| | IKBKG; RELB; FYN; MAP2K2; AKT1; PIK3R1; CHUK; |
| | PDPK1; STAT3; MAP2K1; NFKB1; BRAF; ATF4; AKT3; |
| | PRKCA |
| Inositol Phosphate | PRKCE; IRAK1; PRKAA2; EIF2AK2; PTEN; GRK6; |
| Metabolism | MAPK1; PLK1; AKT2; PIK3CA; CDK8; PIK3CB; PIK3C3; |
| | MAPK8; MAPK3; PRKCD; PRKAA1; MAPK9; CDK2; |
| | PIM1; PIK3C2A; DYRK1A; MAP2K2; PIP5K1A; PIK3R1; |
| | MAP2K1; PAK3; ATM; TTK; CSNK1A1; BRAF; SGK |
| PDGF Signaling | EIF2AK2; ELK1; ABL2; MAPK1; PIK3CA; FOS; PIK3CB; |
| | PIK3C3; MAPK8; CAV1; ABL1; MAPK3; KRAS; SRC; |
| | PIK3C2A; PDGFRB; RAF1; MAP2K2; JAK1; JAK2; |
| | PIK3R1; PDGFRA; STAT3; SPHK1; MAP2K1; MYC; |
| | JUN; CRKL; PRKCA; SRF; STAT1; SPHK2 |
| VEGF Signaling | ACTN4; ROCK1; KDR; FLT1; ROCK2; MAPK1; PGF; |
| | AKT2; PIK3CA; ARNT; PTK2; BCL2; PIK3CB; PIK3C3; |
| | BCL2L1; MAPK3; KRAS; HIF1A; NOS3; PIK3C2A; PXN; |
| | RAF1; MAP2K2; ELAVL1; AKT1; PIK3R1; MAP2K1; SFN; |
| | VEGFA; AKT3; FOXO1; PRKCA |
| Natural Killer Cell Signaling | PRKCE; RAC1; PRKCZ; MAPK1; RAC2; PTPN11; |
| | KIR2DL3; AKT2; PIK3CA; SYK; PRKCI; PIK3CB; |
| | PIK3C3; PRKD1; MAPK3; KRAS; PRKCD; PTPN6; |
| | PIK3C2A; LCK; RAF1; FYN; MAP2K2; PAK4; AKT1; |
| | PIK3R1; MAP2K1; PAK3; AKT3; VAV3; PRKCA |
| Cell Cycle: G1/S | HDAC4; SMAD3; SUV39H1; HDAC5; CDKN1B; BTRC; |
| Checkpoint Regulation | ATR; ABL1; E2F1; HDAC2; HDAC7A; RB1; HDAC11; |
| | HDAC9; CDK2; E2F2; HDAC3; TP53; CDKN1A; CCND1; |
| | E2F4; ATM; RBL2; SMAD4; CDKN2A; MYC; NRG1; |
| | GSK3B; RBL1; HDAC6 |
| T Cell Receptor Signaling | RAC1; ELK1; MAPK1; IKBKB; CBL; PIK3CA; FOS; |
| | NFKB2; PIK3CB; PIK3C3; MAPK8; MAPK3; KRAS; |
| | RELA; PIK3C2A; BTK; LCK; RAF1; IKBKG; RELB; FYN; |
| | MAP2K2; PIK3R1; CHUK; MAP2K1; NFKB1; ITK; BCL10; |
| | JUN; VAV3 |
| Death Receptor Signaling | CRADD; HSPB1; BID; BIRC4; TBK1; IKBKB; FADD; |
| | FAS; NFKB2; BCL2; MAP3K14; MAPK8; RIPK1; CASP8; |
| | DAXX; TNFRSF10B; RELA; TRAF2; TNF; IKBKG; RELB; |
| | CASP9; CHUK; APAF1; NFKB1; CASP2; BIRC2; CASP3; |
| | BIRC3 |
| FGF Signaling | RAC1; FGFR1; MET; MAPKAPK2; MAPK1; PTPN11; |
| | AKT2; PIK3CA; CREB1; PIK3CB; PIK3C3; MAPK8; |
| | MAPK3; MAPK13; PTPN6; PIK3C2A; MAPK14; RAF1; |
| | AKT1; PIK3R1; STAT3; MAP2K1; FGFR4; CRKL; ATF4; |
| | AKT3; PRKCA; HGF |
| GM-CSF Signaling | LYN; ELK1; MAPK1; PTPN11; AKT2; PIK3CA; CAMK2A; |
| | STAT5B; PIK3CB; PIK3C3; GNB2L1; BCL2L1; MAPK3; |
| | ETS1; KRAS; RUNX1; PIM1; PIK3C2A; RAF1; MAP2K2; |
| | AKT1; JAK2; PIK3R1; STAT3; MAP2K1; CCND1; AKT3; |
| | STAT1 |
| Amyotrophic Lateral | BID; IGF1; RAC1; BIRC4; PGF; CAPNS1; CAPN2; |
| Sclerosis Signaling | PIK3CA; BCL2; PIK3CB; PIK3C3; BCL2L1; CAPNI; |
| | PIK3C2A; TP53; CASP9; PIK3R1; RAB5A; CASP1; |
| | APAF1; VEGFA; BIRC2; BAX; AKT3; CASP3; BIRC3 |
| JAK/Stat Signaling | PTPN1; MAPK1; PTPN11; AKT2; PIK3CA; STAT5B; |
| | PIK3CB; PIK3C3; MAPK3; KRAS; SOCS1; STAT5A; |
| | PTPN6; PIK3C2A; RAF1; CDKN1A; MAP2K2; JAK1; |
| | AKT1; JAK2; PIK3R1; STAT3; MAP2K1; FRAP1; AKT3; |
| | STAT1 |
| Nicotinate and Nicotinamide | PRKCE; IRAK1; PRKAA2; EIF2AK2; GRK6; MAPK1; |
| Metabolism | PLK1; AKT2; CDK8; MAPK8; MAPK3; PRKCD; PRKAA1; |
| | PBEF1; MAPK9; CDK2; PIM1; DYRK1A; MAP2K2; |
| | MAP2K1; PAK3; NT5E; TTK; CSNK1A1; BRAF; SGK |
| Chemokine Signaling | CXCR4; ROCK2; MAPK1; PTK2; FOS; CFL1; GNAQ; |
| | CAMK2A; CXCL12; MAPK8; MAPK3; KRAS; MAPK13; |
| | RHOA; CCR3; SRC; PPP1CC; MAPK14; NOX1; RAFI; |
| | MAP2K2; MAP2K1; JUN; CCL2; PRKCA |
| IL-2 Signaling | ELK1; MAPK1; PTPN11; AKT2; PIK3CA; SYK; FOS; |
| | STAT5B; PIK3CB; PIK3C3; MAPK8; MAPK3; KRAS; |
| | SOCS1; STAT5A; PIK3C2A; LCK; RAF1; MAP2K2; |
| | JAK1; AKT1; PIK3R1; MAP2K1; JUN; AKT3 |
| Synaptic Long Term | PRKCE; IGF1; PRKCZ; PRDX6; LYN; MAPK1; GNAS; |
| Depression | PRKCI; GNAQ; PPP2R1A; IGF1R; PRKD1; MAPK3; |
| | KRAS; GRN; PRKCD; NOS3; NOS2A; PPP2CA; |
| | YWHAZ; RAF1; MAP2K2; PPP2R5C; MAP2K1; PRKCA |
| Estrogen Receptor | TAF4B; EP300; CARM1; PCAF; MAPK1; NCOR2; |
| Signaling | SMARCA4; MAPK3; NRIP1; KRAS; SRC; NR3C1; |
| | HDAC3; PPARGC1A; RBM9; NCOA3; RAF1; CREBBP; |
| | MAP2K2; NCOA2; MAP2K1; PRKDC; ESR1; ESR2 |
| Protein Ubiquitination | TRAF6; SMURF1; BIRC4; BRCA1; UCHL1; NEDD4; |
| Pathway | CBL; UBE2I; BTRC; HSPA5; USP7; USP10; FBXW7; |
| | USP9X; STUB1; USP22; B2M; BIRC2; PARK2; USP8; |
| | USP1; VHL; HSP90AA1; BIRC3 |
| IL-10 Signaling | TRAF6; CCR1; ELK1; IKBKB; SP1; FOS; NFKB2; |
| | MAP3K14; MAPK8; MAPK13; RELA; MAPK14; TNF; |
| | IKBKG; RELB; MAP3K7; JAK1; CHUK; STAT3; NFKB1; |
| | JUN; IL1R1; IL6 |
| VDR/RXR Activation | PRKCE; EP300; PRKCZ; RXRA; GADD45A; HES1; |
| | NCOR2; SP1; PRKCI; CDKN1B; PRKD1; PRKCD; |
| | RUNX2; KLF4; YY1; NCOA3; CDKN1A; NCOA2; SPP1; |
| | LRP5; CEBPB; FOXO1; PRKCA |
| TGF-beta Signaling | EP300; SMAD2; SMURF1; MAPK1; SMAD3; SMAD1; |
| | FOS; MAPK8; MAPK3; KRAS; MAPK9; RUNX2; |
| | SERPINE1; RAF1; MAP3K7; CREBBP; MAP2K2; |
| | MAP2K1; TGFBR1; SMAD4; JUN; SMAD5 |
| Toll-like Receptor Signaling | IRAK1; EIF2AK2; MYD88; TRAF6; PPARA; ELK1; |
| | IKBKB; FOS; NFKB2; MAP3K14; MAPK8; MAPK13; |
| | RELA; TLR4; MAPK14; IKBKG; RELB; MAP3K7; CHUK; |
| | NFKB1; TLR2; JUN |
| p38 MAPK Signaling | HSPB1; IRAK1; TRAF6; MAPKAPK2; ELK1; FADD; FAS; |
| | CREB1; DDIT3; RPS6KA4; DAXX; MAPK13; TRAF2; |
| | MAPK14; TNF; MAP3K7; TGFBR1; MYC; ATF4; IL1R1; |
| | SRF; STAT1 |
| Neurotrophin/TRK Signaling | NTRK2; MAPK1; PTPN11; PIK3CA; CREB1; FOS; |
| | PIK3CB; PIK3C3; MAPK8; MAPK3; KRAS; PIK3C2A; |
| | RAF1; MAP2K2; AKT1; PIK3R1; PDPK1; MAP2K1; |
| | CDC42; JUN; ATF4 |
| FXR/RXR Activation | INS; PPARA; FASN; RXRA; AKT2; SDC1; MAPK8; |
| | APOB; MAPK10; PPARG; MTTP; MAPK9; PPARGC1A; |
| | TNF; CREBBP; AKT1; SREBF1; FGFR4; AKT3; FOXO1 |
| Synaptic Long Term | PRKCE; RAP1A; EP300; PRKCZ; MAPK1; CREB1; |
| Potentiation | PRKCI; GNAQ; CAMK2A; PRKD1; MAPK3; KRAS; |
| | PRKCD; PPP1CC; RAF1; CREBBP; MAP2K2; MAP2K1; |
| | ATF4; PRKCA |
| Calcium Signaling | RAP1A; EP300; HDAC4; MAPK1; HDAC5; CREB1; |
| | CAMK2A; MYH9; MAPK3; HDAC2; HDAC7A; HDAC11; |
| | HDAC9; HDAC3; CREBBP; CALR; CAMKK2; ATF4; |
| | HDAC6 |
| EGF Signaling | ELK1; MAPK1; EGFR; PIK3CA; FOS; PIK3CB; PIK3C3; |
| | MAPK8; MAPK3; PIK3C2A; RAF1; JAK1; PIK3R1; |
| | STAT3; MAP2K1; JUN; PRKCA; SRF; STAT1 |
| Hypoxia Signaling in the | EDN1; PTEN; EP300; NQO1; UBE2I; CREB1; ARNT; |
| Cardiovascular System | HIF1A; SLC2A4; NOS3; TP53; LDHA; AKT1; ATM; |
| | VEGFA; JUN; ATF4; VHL; HSP90AA1 |
| LPS/IL-1 Mediated Inhibition | IRAK1; MYD88; TRAF6; PPARA; RXRA; ABCA1; |
| of RXR Function | MAPK8; ALDH1A1; GSTP1; MAPK9; ABCB1; TRAF2; |
| | TLR4; TNF; MAP3K7; NR1H2; SREBF1; JUN; IL1R1 |
| LXR/RXR Activation | FASN; RXRA; NCOR2; ABCA1; NFKB2; IRF3; RELA; |
| | NOS2A; TLR4; TNF; RELB; LDLR; NR1H2; NFKB1; |
| | SREBF1; IL1R1; CCL2; IL6; MMP9 |
| Amyloid Processing | PRKCE; CSNK1E; MAPK1; CAPNS1; AKT2; CAPN2; |
| | CAPN1; MAPK3; MAPK13; MAPT; MAPK14; AKT1; |
| | PSEN1; CSNK1A1; GSK3B; AKT3; APP |
| IL-4 Signaling | AKT2; PIK3CA; PIK3CB; PIK3C3; IRS1; KRAS; SOCS1; |
| | PTPN6; NR3C1; PIK3C2A; JAK1; AKT1; JAK2; PIK3R1; |
| | FRAP1; AKT3; RPS6KB1 |
| Cell Cycle: G2/M DNA | EP300; PCAF; BRCA1; GADD45A; PLK1; BTRC; |
| Damage Checkpoint | CHEK1; ATR; CHEK2; YWHAZ; TP53; CDKN1A; |
| Regulation | PRKDC; ATM; SFN; CDKN2A |
| Nitric Oxide Signaling in the | KDR; FLT1; PGF; AKT2; PIK3CA; PIK3CB; PIK3C3; |
| Cardiovascular System | CAV1; PRKCD; NOS3; PIK3C2A; AKT1; PIK3R1; |
| | VEGFA; AKT3; HSP90AA1 |
| Purine Metabolism | NME2; SMARCA4; MYH9; RRM2; ADAR; EIF2AK4; |
| | PKM2; ENTPD1; RAD51; RRM2B; TJP2; RAD51C; |
| | NT5E; POLD1; NME1 |
| cAMP-mediated Signaling | RAP1A; MAPK1; GNAS; CREB1; CAMK2A; MAPK3; |
| | SRC; RAF1; MAP2K2; STAT3; MAP2K1; BRAF; ATF4 |
| Mitochondrial Dysfunction | SOD2; MAPK8; CASP8; MAPK10; MAPK9; CASP9; |
| Notch Signaling | PARK7; PSEN1; PARK2; APP; CASP3 |
| | HES1; JAG1; NUMB; NOTCH4; ADAM17; NOTCH2; |
| | PSEN1; NOTCH3; NOTCH1; DLL4 |
| Endoplasmic Reticulum | HSPA5; MAPK8; XBP1; TRAF2; ATF6; CASP9; ATF4; |
| Stress Pathway | EIF2AK3; CASP3 |
| Pyrimidine Metabolism | NME2; AICDA; RRM2; EIF2AK4; ENTPD1; RRM2B; |
| | NT5E; POLD1; NME1 |
| Parkinson's Signaling | UCHL1; MAPK8; MAPK13; MAPK14; CASP9; PARK7; |
| | PARK2; CASP3 |
| Cardiac & Beta Adrenergic | GNAS; GNAQ; PPP2R1A; GNB2L1; PPP2CA; PPP1CC; |
| Signaling | PPP2R5C |
| Glycolysis/Gluconeogenesis | HK2; GCK; GPI; ALDH1A1; PKM2; LDHA; HK1 |
| Interferon Signaling | IRF1; SOCS1; JAK1; JAK2; IFITM1; STAT1; IFIT3 |
| Sonic Hedgehog Signaling | ARRB2; SMO; GLI2; DYRK1A; GLI1; GSK3B; DYRK1B |
| Glycerophospholipid | PLD1; GRN; GPAM; YWHAZ; SPHK1; SPHK2 |
| Metabolism | |
| Phospholipid Degradation | PRDX6; PLD1; GRN; YWHAZ; SPHK1; SPHK2 |
| Tryptophan Metabolism | SIAH2; PRMT5; NEDD4; ALDH1A1; CYP1B1; SIAH1 |
| Lysine Degradation | SUV39H1; EHMT2; NSD1; SETD7; PPP2R5C |
| Nucleotide Excision Repair | ERCC5; ERCC4; XPA; XPC; ERCC1 |
| Pathway | |
| Starch and Sucrose | UCHL1; HK2; GCK; GPI; HK1 |
| Metabolism | |
| Aminosugars Metabolism | NQO1; HK2; GCK; HK1 |
| Arachidonic Acid | PRDX6; GRN; YWHAZ; CYP1B1 |
| Metabolism | |
| Circadian Rhythm Signaling | CSNK1E; CREB1; ATF4; NR1D1 |
| Coagulation System | BDKRB1; F2R; SERPINE1; F3 |
| Dopamine Receptor | PPP2R1A; PPP2CA; PPP1CC; PPP2R5C |
| Signaling | |
| Glutathione Metabolism | IDH2; GSTP1; ANPEP; IDH1 |
| Glycerolipid Metabolism | ALDH1A1; GPAM; SPHK1; SPHK2 |
| Linoleic Acid Metabolism | PRDX6; GRN; YWHAZ; CYP1B1 |
| Methionine Metabolism | DNMT1; DNMT3B; AHCY; DNMT3A |
| Pyruvate Metabolism | GLO1; ALDH1A1; PKM2; LDHA |
| Arginine and Proline | ALDH1A1; NOS3; NOS2A |
| Metabolism | |
| Eicosanoid Signaling | PRDX6; GRN; YWHAZ |
| Fructose and Mannose | HK2; GCK; HK1 |
| Metabolism | |
| Galactose Metabolism | HK2; GCK; HK1 |
| Stilbene, Coumarine and | PRDX6; PRDX1; TYR |
| Lignin Biosynthesis | |
| Antigen Presentation | CALR; B2M |
| Pathway | |
| Biosynthesis of Steroids | NQO1; DHCR7 |
| Butanoate Metabolism | ALDH1A1; NLGN1 |
| Citrate Cycle | IDH2; IDH1 |
| Fatty Acid Metabolism | ALDH1A1; CYP1B1 |
| Glycerophospholipid | PRDX6; CHKA |
| Metabolism | |
| Histidine Metabolism | PRMT5; ALDH1A1 |
| Inositol Metabolism | ERO1L; APEX1 |
| Metabolism of Xenobiotics | GSTP1; CYP1B1 |
| by Cytochrome p450 | |
| Methane Metabolism | PRDX6; PRDX1 |
| Phenylalanine Metabolism | PRDX6; PRDX1 |
| Propanoate Metabolism | ALDH1A1; LDHA |
| Selenoamino Acid | PRMT5; AHCY |
| Metabolism | |
| Sphingolipid Metabolism | SPHK1; SPHK2 |
| Aminophosphonate | PRMT5 |
| Metabolism | |
| Androgen and Estrogen | PRMT5 |
| Metabolism | |
| Ascorbate and Aldarate | ALDH1A1 |
| Metabolism | |
| Bile Acid Biosynthesis | ALDH1A1 |
| Cysteine Metabolism | LDHA |
| Fatty Acid Biosynthesis | FASN |
| Glutamate Receptor | GNB2L1 |
| Signaling | |
| NRF2-mediated Oxidative | PRDX1 |
| Stress Response | |
| Pentose Phosphate | GPI |
| Pathway | |
| Pentose and Glucuronate | UCHL1 |
| Interconversions | |
| Retinol Metabolism | ALDH1A1 |
| Riboflavin Metabolism | TYR |
| Tyrosine Metabolism | PRMT5, TYR |
| Ubiquinone Biosynthesis | PRMT5 |
| Valine, Leucine and | ALDH1A1 |
| Isoleucine Degradation | |
| Glycine, Serine and | CHKA |
| Threonine Metabolism | |
| Lysine Degradation | ALDH1A1 |
| Pain/Taste | TRPM5; TRPA1 |
| Pain | TRPM7; TRPC5; TRPC6; TRPC1; Cnr1; cnr2; Grk2; |
| | Trpa1; Pomc; Cgrp; Crf; Pka; Era; Nr2b; TRPM5; Prkaca; |
| | Prkacb; Prkar1a; Prkar2a |
| Mitochondrial Function | AIF; CytC; SMAC (Diablo); Aifm-1; Aifm-2 |
| Developmental Neurology | BMP-4; Chordin (Chrd); Noggin (Nog); WNT (Wnt2; |
| | Wnt2b; Wnt3a; Wnt4; Wnt5a; Wnt6; Wnt7b; Wnt8b; |
| | Wnt9a; Wnt9b; Wnt10a; Wnt10b; Wnt16); beta-catenin; |
| | Dkk-1; Frizzled related proteins; Otx-2; Gbx2; FGF-8; |
| | Reelin; Dab1; unc-86 (Pou4f1 or Brn3a); Numb; Reln |

[0846] In an aspect, the invention provides a method of individualized or personalized treatment of a genetic disease in a subject in need of such treatment comprising: (a) introducing one or more mutations ex vivo in a tissue, organ or a cell line, or in vivo in a transgenic non-human mammal, comprising delivering to cell(s) of the tissue, organ, cell or mammal a composition comprising the particle delivery system or the delivery system or the virus particle of any one of the above embodiment or the cell of any one of the above embodiment, wherein the specific mutations or precise sequence substitutions are or have been correlated to the genetic disease; (b) testing treatment(s) for the genetic disease on the cells to which the vector has been delivered that have the specific mutations or precise sequence substitutions correlated to the genetic disease; and (c) treating the subject based on results from the testing of treatment(s) of step (b).

### Infectious Diseases

[0847] In one embodiment, the composition, system, (s) or component(s) thereof can be used to diagnose, prognose, treat, and/or prevent an infectious disease caused by a microorganism, such as bacteria, virus, fungi, parasites, or combinations thereof.

[0848] In one embodiment, the system(s) or component(s) thereof can be capable of targeting specific microorganism within a mixed population. Exemplary methods of such techniques are described in e.g. Gomaa A A, Klumpe H E, Luo M L, Selle K, Barrangou R, Beisel C L. 2014. Programmable removal of bacterial strains by use of genome-targeting composition, systems, mBio 5:e00928-13; Citorik R J, Mimee M, Lu T K. 2014. Sequence-specific antimicrobials using efficiently delivered RNA-guided nucleases. Nat Biotechnol 32:1141-1145, the teachings of which can be adapted for use with the compositions, systems, and components thereof described herein.

[0849] In one embodiment, the composition, system, (s) and/or components thereof can be capable of targeting pathogenic and/or drug-resistant microorganisms, such as bacteria, virus, parasites, and fungi. In one embodiment, the composition, system, (s) and/or components thereof can be capable of targeting and modifying one or more polynucleotides in a pathogenic microorganism such that the microorganism is less virulent, killed, inhibited, or is otherwise rendered incapable of causing disease and/or infecting and/or replicating in a host cell.

[0850] In one embodiment, the pathogenic bacteria that can be targeted and/or modified by the composition, system, (s) and/or component(s) thereof described herein include, but are not limited to, those of the genus Actinomyces (e.g. A. israelii), Bacillus (e.g. B. anthracis, B. cereus), Bactereoides (e.g. B. fragilis), Bartonella (B. henselae, B. quintana), Bordetella (B. pertussis), Borrelia (e.g. B. burgdorferi, B. garinii, B. afzelii, and B. recurreentis), Brucella (e.g. B. abortus, B. canis, B. melitensis, and B. suis), Campylobacter (e.g. C. jejuni), Chlamydia (e.g. C. pneumoniae and C. trachomatis), Chlamydophila (e.g. C. psittaci), Clostridium (e.g. C. botulinum, C. difficile, C. perfringens. C. tetani), Corynebacterium (e.g. C. diptheriae), Enterococcus (e.g. E. Faecalis, E. faecium), Ehrlichia (E. canis and E. chaffensis) Escherichia (e.g. E. co/i), Francisella (e.g. F. tularensis), Haemophilus (e.g. H. influenzae), Helicobacter (H pylori), Klebsiella (E.g. K. pneumoniae), Legionella (e.g. L. pneumophila), Leptospira (e.g. L. interrogans, L. santarosai, L. weilii, L. noguchii), Listereia (e.g. L. monocytogeenes), Mycobacterium (e.g. M. leprae, M tuberculosis, M. ulcerans), Mycoplasma (M. pneumoniae), Neisseria (N. gonorrhoeae and N. menigitidis), Nocardia (e.g. N. asteeroides), Pseudomonas (P. aeruginosa), Rickettsia (R. rickettsia), Salmonella (S. typhi and S. typhimurium), Shigella (S. sonnei and S. dysenteriae), Staphylococcus (S. aureus, S. epidermidis, and S. saprophyticus), Streeptococcus (S. agalactiaee, S. pneumoniae, S. pyogenes), Treponema (T. pallidum), Ureeaplasma (e.g. U. urealyticum), Vibrio (e.g. V. cholerae), Yersinia (e.g. Y. pestis, Y. enteerocolitica, and Y. pseudotuberculosis).

[0851] In one embodiment, the pathogenic virus that can be targeted and/or modified by the composition, system, (s) and/or component(s) thereof described herein include, but are not limited to, a double-stranded DNA virus, a partly double-stranded DNA virus, a single-stranded DNA virus, a positive single-stranded RNA virus, a negative single-stranded RNA virus, or a double stranded RNA virus. In one embodiment, the pathogenic virus can be from the family Adenoviridae (e.g. Adenovirus), Herpeesviridae (e.g. Herpes simplex, type 1, Herpes simplex, type 2, Varicella-zoster virus, Epstein-Barr virus, Human cytomegalovirus, Human herpesvirus, type 8), Papillomaviridae (e.g. Human papillomavirus), Polyomaviridae (e.g. BK virus, JC virus), Poxviridae (e.g. smallpox), Hepadnaviridae (e.g. Hepatitis B), Parvoviridae (e.g. Parvovirus B19), Astroviridae (e.g. Human astrovirus), Caliciviridae (e.g. Norwalk virus), Picornaviridae (e.g. coxsackievirus, hepatitis A virus, poliovirus, rhinovirus), Coronaviridae (e.g. Severe acute respiratory syndrome-related coronavirus, strains: Severe acute respiratory syndrome virus, Severe acute respiratory syndrome coronavirus 2 (COVID-19)), Flaviviridae (e.g. Hepatitis C virus, yellow fever virus, dengue virus, WestNile virus, TBE virus), Togaviridae (e.g. Rubella virus), Hepeviridae (e.g. Hepatitis E virus), Retroviridae (Human immunodeficiency virus (HIV)), Orthomyxoviridae (e.g. Influenza virus), Arenaviridae (e.g. Lassa virus), Bunyaviridae (e.g. Crimean-Congo hemorrhagic fever virus, Hantaan virus), Filoviridae (e.g. Ebola virus and Marburg virus), Paramyxoviridae (e.g. Measles virus, Mumps virus, Parainfluenza virus, Respiratory syncytial virus), Rhabdoviridae (Rabies virus), Hepatits D virus, Reoviridae (e.g. Rotavirus, Orbivirus, Coltivirus, Banna virus).

[0852] In one embodiment, the pathogenic fungi that can be targeted and/or modified by the composition, system, (s) and/or component(s) thereof described herein include, but are not limited to, those of the genus Candida (e.g. C. albicans), Aspergillus (e.g. A. fumigatus, A. flavus, A. clavatus), Cryptococcus (e.g. C. neoformans, C. gattii), Histoplasma (H. capsulatum), Pneumocystis (e.g. P. jiroveecii), Stachybotrys (e.g. S. chartarum).

[0853] In one embodiment, the pathogenic parasites that can be targeted and/or modified by the composition, system, (s) and/or component(s) thereof described herein include, but are not limited to, protozoa, helminths, and ectoparasites. In one embodiment, the pathogenic protozoa that can be targeted and/or modified by the composition, system, (s) and/or component(s) thereof described herein include, but are not limited to, those from the groups Sarcodina (e.g. ameba such as Entamoeba), Mastigophora (e.g. flagellates such as Giardia and Leishmania), Cilophora (e.g. ciliates such as Balantidum), and sporozoa (e.g. plasmodium and cryptosporidium). In one embodiment, the pathogenic helminths that can be targeted and/or modified by the composition, system, (s) and/or component(s) thereof described herein include, but are not limited to, flatworms (platyhelminths), thorny-headed worms (acanthoceephalins), and roundworms (nematodes). In one embodiment, the pathogenic ectoparasites that can be targeted and/or modified by the composition, system, (s) and/or component(s) thereof described herein include, but are not limited to, ticks, fleas, lice, and mites.

[0854] In one embodiment, the pathogenic parasite that can be targeted and/or modified by the composition, system, (s) and/or component(s) thereof described herein include, but are not limited to, Acanthamoeba spp., Balamuthia mandrillaris, Babesiosis spp. (e.g. Babesia B. divergens, B. bigemina, B. equi, B. microfti, B. duncani), Balantidiasis spp. (e.g. Balantidium coli), Blastocystis spp., Cryptosporidium spp., Cyclosporiasis spp. (e.g. Cyclospora cayetanensis), Dientamoebiasis spp. (e.g. Dientamoeba fragilis), Amoebiasis spp. (e.g. Entamoeba histolytica), Giardiasis spp. (e.g. Giardia lamblia), Isosporiasis spp. (e.g. Isospora belli), Leishmania spp., Naegleria spp. (e.g. Naegleria fowleri), Plasmodium spp. (e.g. Plasmodium falciparum, Plasmodium vivax, Plasmodium ovale curtisi, Plasmodium ovale wallikeri, Plasmodium malariae, Plasmodium knowlesi), Rhinosporidiosis spp. (e.g. Rhinosporidium seeberi), Sarcocystosis spp. (e.g. Sarcocystis bovihominis, Sarcocystis suihominis), Toxoplasma spp. (e.g. Toxoplasma gondii), Trichomonas spp. (e.g. Trichomonas vaginalis), Trypanosoma spp. (e.g. Trypanosoma brucei), Trypanosoma spp. (e.g. Trypanosoma cruzi), Tapeworm (e.g. Cestoda, Taenia multiceps, Taenia saginata, Taenia solium), Diphyllobothrium latum spp., Echinococcus spp. (e.g. Echinococcus granulosus, Echinococcus multilocularis, E. vogeli, E. oligarthrus), Hymenolepis spp. (e.g. Hymenolepis nana, Hymenolepis diminuta), Bertiella spp. (e.g. Bertiella mucronata, Bertiella studeri), Spirometra (e.g. Spirometra erinaceieuropaei), Clonorchis spp. (e.g. Clonorchis sinensis; Clonorchis viverrini), Dicrocoelium spp. (e.g. Dicrocoelium dendriticum), Fasciola spp. (e.g. Fasciola hepatica, Fasciola gigantica), Fasciolopsis spp. (e.g. Fasciolopsis buski), Metagonimus spp. (e.g. Metagonimus yokogawai), Metorchis spp. (e.g. Metorchis conjunctus), Opisthorchis spp. (e.g. Opisthorchis viverrini, Opisthorchis felineus), Clonorchis spp. (e.g. Clonorchis sinensis), Paragonimus spp. (e.g. Paragonimus westermani; Paragonimus africanus; Paragonimus caliensis; Paragonimus kellicotti; Paragonimus skrjabini; Paragonimus uterobilateralis), Schistosoma sp., Schistosoma spp. (e.g. Schistosoma mansoni, Schistosoma haematobium, Schistosoma japonicum, Schistosoma mekongi, and Schistosoma intercalatum), Echinostoma spp. (e.g. E. echinatum), Trichobilharzia spp. (e.g. Trichobilharzia regent), Ancylostoma spp. (e.g. Ancylostoma duodenale), Necator spp. (e.g. Necator americanus), Angiostrongylus spp., Anisakis spp., Ascaris spp. (e.g. Ascaris lumbricoides), Baylisascaris spp. (e.g. Baylisascaris procyonis), Brugia spp. (e.g. Brugia malayi, Brugia timori), Dioctophyme spp. (e.g. Dioctophyme renale), Dracunculus spp. (e.g. Dracunculus medinensis), Enterobius spp. (e.g. Enterobius vermicularis, Enterobius gregorii), Gnathostoma spp. (e.g. Gnathostoma spinigerum, Gnathostoma hispidum), Halicephalobus spp. (e.g. Halicephalobus gingivalis), Loa loa spp. (e.g. Loa loa filaria), Mansonella spp. (e.g. Mansonella streptocerca), Onchocerca spp. (e.g. Onchocerca volvulus), Strongyloides spp. (e.g. Strongyloides stercoralis), Thelazia spp. (e.g. Thelazia calforniensis, Thelazia callipaeda), Toxocara spp. (e.g. Toxocara canis, Toxocara cati, Toxascaris leonine), Trichinella spp. (e.g. Trichinella spiralis, Trichinella britovi, Trichinella nelsoni, Trichinella nativa), Trichuris spp. (e.g. Trichuris trichiura, Trichuris vulpis), Wuchereria spp. (e.g. Wuchereria bancrofti), Dermatobia spp. (e.g. Dermatobia hominis), Tunga spp. (e.g. Tunga penetrans), Cochliomyia spp. (e.g. Cochliomyia hominivorax), Linguatula spp. (e.g. Linguatula serrata), Archiacanthocephala sp., Moniliformis sp. (e.g. Monilformis monilformis), Pediculus spp. (e.g. Pediculus humanus capitis, Pediculus humanus humanus), Pthirus spp. (e.g. Pthirus pubis), Arachnida spp. (e.g. Trombiculidae, Ixodidae, Argaside), Siphonaptera spp (e.g. Siphonaptera: Pulicinae), Cimicidae spp. (e.g. Cimex lectularius and Cimex hemipterus), Diptera spp., Demodex spp. (e.g. Demodex folliculorum brevis canis), Sarcoptes spp. (e.g. Sarcoptes scabiei), Dermanyssus spp. (e.g. Dermanyssus gallinae), Ornithonyssus spp. (e.g. Ornithonyssus sylviarum, Ornithonyssus bursa, Ornithonyssus bacoti), Laelaps spp. (e.g. Laelaps echidnina), Liponyssoides spp. (e.g. Liponyssoides sanguineus).

[0855] In one embodiment the gene targets can be any of those as set forth in Table 1 of Strich and Chertow. 2019. J. Clin. Microbio. 57:4 e01307-18, which is incorporated herein as if expressed in its entirety herein.

[0856] In one embodiment, the method can include delivering a composition, system, and/or component thereof to a pathogenic organism described herein, allowing the composition, system, and/or component thereof to specifically bind and modify one or more targets in the pathogenic organism, whereby the modification kills, inhibits, reduces the pathogenicity of the pathogenic organism, or otherwise renders the pathogenic organism non-pathogenic. In one embodiment, delivery of the composition, system, occurs in vivo (i.e. in the subject being treated). In one embodiment occurs by an intermediary, such as microorganism or phage that is non-pathogenic to the subject but is capable of transferring polynucleotides and/or infecting the pathogenic microorganism. In one embodiment, the intermediary microorganism can be an engineered bacteria, virus, or phage that contains the composition, system, (s) and/or component(s) thereof and/or vectors and/or vector systems. The method can include administering an intermediary microorganism containing the composition, system, (s) and/or component(s) thereof and/or vectors and/or vector systems to the subject to be treated. The intermediary microorganism can then produce the compositions and/or component thereof or transfer a composition, system, polynucleotide to the pathogenic organism. In embodiments, where the compositions and/or component thereof, vector, or vector system is transferred to the pathogenic microorganism, the composition, system, or component thereof is then produced in the pathogenic microorganism and modifies the pathogenic microorganism such that it is less virulent, killed, inhibited, or is otherwise rendered incapable of causing disease and/or infecting and/or replicating in a host or cell thereof.

[0857] In one embodiment, where the pathogenic microorganism inserts its genetic material into the host cell's genome (e.g. a virus), the composition, system, can be designed such that it modifies the host cell's genome such that the viral DNA or cDNA cannot be replicated by the host cell's machinery into a functional virus. In one embodiment, where the pathogenic microorganism inserts its genetic material into the host cell's genome (e.g. a virus), the composition, system, can be designed such that it modifies the host cell's genome such that the viral DNA or cDNA is deleted from the host cell's genome.

[0858] It will be appreciated that inhibiting or killing the pathogenic microorganism, the disease and/or condition that its infection causes in the subject can be treated or prevented. Thus, also provided herein are methods of treating and/or preventing one or more diseases or symptoms thereof caused by any one or more pathogenic microorganisms, such as any of those described herein.

### Mitochondrial Diseases

[0859] Some of the most challenging mitochondrial disorders arise from mutations in mitochondrial DNA (mtDNA), a high copy number genome that is maternally inherited. In one embodiment, mtDNA mutations can be modified using a composition, system, described herein. In one embodiment, the mitochondrial disease that can be diagnosed, prognosed, treated, and/or prevented can be MELAS (mitochondrial myopathy encephalopathy, and lactic acidosis and stroke-like episodes), CPEO/PEO (chronic progressive external ophthalmoplegia syndrome/progressive external ophthalmoplegia), KSS (Kearns-Sayre syndrome), MIDD (maternally inherited diabetes and deafness), MERRF (myoclonic epilepsy associated with ragged red fibers), NIDDM (noninsulin-dependent diabetes mellitus), LHON (Leber hereditary optic neuropathy), LS (Leigh Syndrome) an aminoglycoside induced hearing disorder, NARP (neuropathy, ataxia, and pigmentary retinopathy), Extrapyramidal disorder with akinesia-rigidity, psychosis and SNHL, Nonsyndromic hearing loss a cardiomyopathy, an encephalomyopathy, Pearson's syndrome, or a combination thereof.

[0860] In one embodiment, the mtDNA of a subject can be modified in vivo or ex vivo. In one embodiment, where the mtDNA is modified ex vivo, after modification the cells containing the modified mitochondria can be administered back to the subject. In one embodiment, the composition, system, or component thereof can be capable of correcting an mtDNA mutation, or a combination thereof.

[0861] In one embodiment, at least one of the one or more mtDNA mutations is selected from the group consisting of: A3243G, C3256T, T3271C, G1019A, A1304T, A15533G, C1494T, C4467A, T1658C, G12315A, A3421G, A8344G, T8356C, G8363A, A13042T, T3200C, G3242A, A3252G, T3264C, G3316A, T3394C, T14577C, A4833G, G3460A, G9804A, G11778A, G14459A, A14484G, G15257A, T8993C, T8993G, G10197A, G13513A, T1095C, C1494T, A1555G, G1541A, C1634T, A3260G, A4269G, T7587C, A8296G, A8348G, G8363A, T9957C, T9997C, G12192A, C12297T, A14484G, G15059A, duplication of CCCCCTCCCC-tandem repeats at positions 305-314 and/or 956-965, deletion at positions from 8,469-13,447, 4,308-14,874, and/or 4,398-14,822, 961ins/delC, the mitochondrial common deletion (e.g. mtDNA 4,977 bp deletion), and combinations thereof.

[0862] In one embodiment, the mitochondrial mutation can be any mutation as set forth in or as identified by use of one or more bioinformatic tools available at Mitomap available at mitomap.org. Such tools include, but are not limited to, “Variant Search, aka Market Finder”, Find Sequences for Any Haplogroup, aka “Sequence Finder”, “Variant Info”, “POLG Pathogenicity Prediction Server”, “MITOMASTER”, “Allele Search”, “Sequence and Variant Downloads”, “Data Downloads”. MitoMap contains reports of mutations in mtDNA that can be associated with disease and maintains a database of reported mitochondrial DNA Base Substitution Diseases: rRNA/tRNA mutations.

[0863] In one embodiment, the method includes delivering a composition, system, and/or a component thereof to a cell, and more specifically one or more mitochondria in a cell, allowing the composition, system, and/or component thereof to modify one or more target polynucleotides in the cell, and more specifically one or more mitochondria in the cell. The target polynucleotides can correspond to a mutation in the mtDNA, such as any one or more of those described herein. In one embodiment, the modification can alter a function of the mitochondria such that the mitochondria functions normally or at least is/are less dysfunctional as compared to an unmodified mitochondria. Modification can occur in vivo or ex vivo. Where modification is performed ex vivo, cells containing modified mitochondria can be administered to a subject in need thereof in an autologous or allogenic manner.

### Microbiome Modification

[0864] Microbiomes play important roles in health and disease. For example, the gut microbiome can play a role in health by controlling digestion, preventing growth of pathogenic microorganisms and have been suggested to influence mood and emotion. Imbalanced microbiomes can promote disease and are suggested to contribute to weight gain, unregulated blood sugar, high cholesterol, cancer, and other disorders. A healthy microbiome has a series of joint characteristics that can be distinguished from non-healthy individuals, thus detection and identification of the disease-associated microbiome can be used to diagnose and detect disease in an individual. The compositions, systems, and components thereof can be used to screen the microbiome cell population and be used to identify a disease associated microbiome. Cell screening methods utilizing compositions, systems, and components thereof are described elsewhere herein and can be applied to screening a microbiome, such as a gut, skin, vagina, and/or oral microbiome, of a subject.

[0865] In one embodiment, the microbe population of a microbiome in a subject can be modified using a composition, system, and/or component thereof described herein. In one embodiment, the composition, system, and/or component thereof can be used to identify and select one or more cell types in the microbiome and remove them from the microbiome population. Exemplary methods of selecting cells using a composition, system, and/or component thereof are described elsewhere herein. In this way the make-up or microorganism profile of the microbiome can be altered. In one embodiment, the alteration causes a change from a diseased microbiome composition to a healthy microbiome composition. In this way the ratio of one type or species of microorganism to another can be modified, such as going from a diseased ratio to a healthy ratio. In one embodiment, the cells selected are pathogenic microorganisms.

[0866] In one embodiment, the compositions and systems described herein can be used to modify a polynucleotide in a microorganism of a microbiome in a subject. In one embodiment, the microorganism is a pathogenic microorganism. In one embodiment, the microorganism is a commensal and non-pathogenic microorganism. Methods of modifying polynucleotides in a cell in the subject are described elsewhere herein and can be applied to these embodiments.

### Models of Diseases and Conditions

[0867] In an aspect, the invention provides a method of modeling a disease associated with a genomic locus in a eukaryotic organism or a non-human organism comprising manipulation of a target sequence within a coding, non-coding or regulatory element of said genomic locus comprising delivering a non-naturally occurring or engineered composition comprising a viral vector system comprising one or more viral vectors operably encoding a composition for expression thereof, wherein the composition comprises particle delivery system or the delivery system or the virus particle of any one of the above embodiments or the cell of any one of the above embodiment.

[0868] In one aspect, the invention provides a method of generating a model eukaryotic cell that can include one or more a mutated disease genes and/or infectious microorganisms. In one embodiment, a disease gene is any gene associated an increase in the risk of having or developing a disease. In one embodiment, the method includes (a) introducing one or more vectors into a eukaryotic cell, wherein the one or more vectors comprise a composition, system, and/or component thereof and/or a vector or vector system that is capable of driving expression of a composition, system, and/or component thereof including, but not limited to: a guide sequence, one or more IscB polypeptide nucleases, and combinations thereof and (b) allowing a composition, system, or complex to bind to one or more target polynucleotides, e.g., to effect cleavage, nicking, or other modification of the target polynucleotide within said disease gene, wherein the composition, system, or complex is composed of one or more IscB polypeptide or CRISPR-associated IscB polypeptide nuclease complexed with (1) one or more ωRNAs or guide sequences that is/are hybridized to the target sequence(s) within the target polynucleotide(s), and optionally (2) the ωRNA scaffold sequence(s), thereby generating a model eukaryotic cell comprising one or more mutated disease gene(s). Thus, In one embodiment the composition and system, contains nucleic acid molecules for and drives expression of one or more of: a IscB polypeptide or CRISPR-associated IscB polypeptide nuclease, a guide sequence and/or a Homologous Recombination template and/or a stabilizing ligand if the IscB polypeptide or CRISPR-associated IscB polypeptide nuclease has a destabilization domain. In one embodiment, said cleavage comprises cleaving one or two strands at the location of the target sequence by the IscB polypeptide or CRISPR-associated IscB polypeptide nuclease. In one embodiment, nicking comprises nicking one or two strands at the location of the target sequence by the IscB polypeptide or CRISPR-associated IscB polypeptide nuclease. In one embodiment, said cleavage or nicking results in modified transcription of a target polynucleotide. In one embodiment, modification results in decreased transcription of the target polynucleotide. In one embodiment, the method further comprises repairing said cleaved or nicked target polynucleotide by homologous recombination with a recombination template polynucleotide, wherein said repair results in a mutation comprising an insertion, deletion, or substitution of one or more nucleotides of said target polynucleotide. In one embodiment, said mutation results in one or more amino acid changes in a protein expression from a gene comprising the target sequence.

[0869] The disease modeled can be any disease with a genetic or epigenetic component. In one embodiment, the disease modeled can be any as discussed elsewhere herein.

In situ Disease Detection

[0870] The compositions, systems, and/or components thereof can be used for diagnostic methods of detection such as in CASFISH (see e.g. Deng et al. 2015. PNAS USA 112(38): 11870-11875), CRISPR-Live FISH (see e.g. Wang et al. 2020. Science; 365(6459):1301-1305), sm-FISH (Lee and Jefcoate. 2017. Front. Endocrinol. doi.org/10.3389/fendo.2017.00289), sequential FISH CRISPRainbow (Ma et al. Nat Biotechnol, 34 (2016), pp. 528-530), CRISPR-Sirius (Nat Methods, 15 (2018), pp. 928-931), Casilio (Cheng et al. Cell Res, 26 (2016), pp. 254-257), Halo-Tag based genomic loci visualization techniques (e.g. Deng et al. 2015. PNAS USA 112(38): 11870-11875; Knight et al., Science, 350 (2015), pp. 823-826), RNA-aptamer based methods (e.g. Ma et al., J Cell Biol, 214 (2016), pp. 529-537), molecular beacon-based methods (e.g. Zhao et al. Biomaterials, 100 (2016), pp. 172-183; Wu et al. Nucleic Acids Res (2018)), Quantum Dot-based systems (e.g. Ma et al. Anal Chem, 89 (2017), pp. 12896-12901), multiplexed methods (e.g. Ma et al., Proc Natl Acad Sci USA, 112 (2015), pp. 3002-3007; Fu et al. Nat Commun, 7 (2016), p. 11707; Ma et al. Nat Biotechnol, 34 (2016), pp. 528-530; Shao et al. Nucleic Acids Res, 44 (2016), Article e86); Wang et al. Sci Rep, 6 (2016), p. 26857), 9, and other in situ CRISPR-hybridization based methods (e.g. Chen et al. Cell, 155 (2013), pp. 1479-1491; Gu et al. Science, 359 (2018), pp. 1050-1055; Tanebaum et al. Cell, 159 (2014), pp. 635-646; Ye et al. Protein Cell, 8 (2017), pp. 853-855; Chen et al. Nat Commun, 9 (2018), p. 5065; Shao et al. ACS Synth Biol (2017); Fu et al. Nat Commun, 7 (2016), p. 11707; Shao et al. Nucleic Acids Res, 44 (2016), Article e86; Wang et al., Sci Rep, 6 (2016), p. 26857), all of which are incorporated by reference herein as if expressed in their entirety and whose teachings can be adapted to the compositions, systems, and components thereof described herein in view of the description herein.

[0871] In one embodiment, the composition, system, or component thereof can be used in a detection method, such as an in-situ detection method described herein. In one embodiment, the composition, system, or component thereof can include a catalytically inactivate IscB polypeptide nuclease described herein and use this system in detection methods such as fluorescence in situ hybridization (FISH) or any other described herein. In one embodiment, the inactivated IscB polypeptide nuclease, which lacks the ability to produce DNA double-strand breaks may be fused with a marker, such as fluorescent protein, such as the enhanced green fluorescent protein (eEGFP) and co-expressed with small guide RNAs to target pericentric, centric and telomeric repeats in vivo. The dead IscB polypeptide or CRISPR-associated IscB polypeptide nuclease or system thereof can be used to visualize both repetitive sequences and individual genes in the human genome. Such new applications of labelled dead IscB polypeptide or CRISPR-associated IscB polypeptide nuclease and compositions, systems, thereof can be important in imaging cells and studying the functional nuclear architecture, especially in cases with a small nucleus volume or complex 3-D structures.

### Cell Selection

[0872] In one embodiment, the compositions, systems, and/or components thereof described herein can be used in a method to screen and/or select cells. In one embodiment, composition, system, -based screening/selection method can be used to identify diseased cells in a cell population. In one embodiment, selection of the cells results in a modification in the cells such that the selected cells die. In this way, diseased cells can be identified, and removed from the healthy cell population. In one embodiment, the diseased cells can be a cancer cell, pre-cancerous cell, a virus or other pathogenic organism infected cells, or otherwise abnormal cell. In one embodiment, the modification can impart another detectable change in the cells to be selected (e.g. a functional change and/or genomic barcode) that facilitates selection of the desired cells. In one embodiment a negative selection scheme can be used to obtain a desired cell population. In these embodiments, the cells to be selected against are modified, thus can be removed from the cell population based on their death or identification or sorting based the detectable change imparted on the cells. Thus, in these embodiments, the remaining cells after selection are the desired cell population.

[0873] In one embodiment, a method of selecting one or more cell(s) containing a polynucleotide modification can include: introducing one or more composition, system, (s) and/or components thereof, and/or vectors or vector systems into the cell(s), wherein the composition, system, (s) and/or components thereof, and/or vectors or vector systems contains and/or is capable of expressing one or more of: a IscB polypeptide or CRISPR-associated IscB polypeptide nuclease, an ωRNA sequence, and an recombination template; wherein, for example that which is being expressed is within and expressed in vivo by the composition, system, vector or vector system and/or the recombination template comprises the one or more mutations that abolish IscB polypeptide or CRISPR-associated IscB polypeptide nuclease cleavage; allowing homologous recombination of the recombination template with the target polynucleotide in the cell(s) to be selected; allowing a composition, system, or complex to bind to a target polynucleotide to effect cleavage of the target polynucleotide within said gene, wherein the AAV-complex comprises the IscB polypeptide or CRISPR-associated IscB polypeptide nuclease complexed with (1) the ωRNA or guide sequence that is hybridized to the target sequence within the target polynucleotide, and (2) the ωRNA scaffold, wherein binding of the complex to the target polynucleotide induces cell death or imparts some other detectable change to the cell, thereby allowing one or more cell(s) in which one or more mutations have been introduced to be selected. In one embodiment, the cell to be selected may be a eukaryotic cell. In one embodiment, the cell to be selected may be a prokaryotic cell. Selection of specific cells via the methods herein can be performed without requiring a selection marker or a two-step process that may include a counter-selection system.

### Therapeutic Agent Development

[0874] The compositions, systems, and components thereof described herein can be used to develop IscB polypeptide nuclease-based biologically active agents, such as small molecule therapeutics. Thus, described herein are methods for developing a biologically active agent that modulates a cell function and/or signaling event associated with a disease and/or disease gene. In one embodiment, the method comprises (a) contacting a test compound with a diseased cell and/or a cell containing a disease gene cell; and (b) detecting a change in a readout that is indicative of a reduction or an augmentation of a cell signaling event or other cell functionality associated with said disease or disease gene, thereby developing said biologically active agent that modulates said cell signaling event or other functionality associated with said disease gene. In one embodiment, the diseased cell is a model cell described elsewhere herein. In one embodiment, the diseased cell is a diseased cell isolated from a subject in need of treatment. In one embodiment, the test compound is a small molecule agent. In one embodiment, test compound is a small molecule agent. In one embodiment, the test compound is a biologic molecule agent.

[0875] In one embodiment, the method involves developing a therapeutic based on the composition, system, described herein. In one embodiment, the therapeutic comprises a IscB polypeptide or CRISPR-associated IscB polypeptide nuclease and/or a ωRNA with a reprogrammable spacer capable of hybridizing to a target sequence of interest. In one embodiment, the therapeutic is a vector or vector system that can contain a) a first regulatory element operably linked to a nucleotide sequence encoding the IscB polypeptide or CRISPR-associated IscB polypeptide nuclease; and b) a second regulatory element operably linked to one or more nucleotide sequences encoding one or more nucleic acid molecules comprising a ωRNA comprising a reprogrammable spacer sequence, a conserved RNA sequence; wherein components (a) and (b) are located on same or different vectors. In one embodiment, the biologically active agent is a composition comprising a delivery system operably configured to deliver composition, system, or components thereof, and/or or one or more polynucleotide sequences, vectors, or vector systems containing or encoding said components into a cell and capable of forming a complex with the components of the composition and system herein, and wherein said complex is operable in the cell. In one embodiment, the complex can include the IscB polypeptide or CRISPR-associated IscB polypeptide nuclease as described herein, ωRNA scaffold comprising the guide sequence (reprogrammable spacer sequence), and a conserved nucleotide sequence. In any such compositions, the delivery system can be a yeast system, a lipofection system, a microinjection system, a biolistic system, virosomes, liposomes, immunoliposomes, polycations, lipid:nucleic acid conjugates or artificial virions, or any other system as described herein. In one embodiment, the delivery is via a particle, a nanoparticle, a lipid or a cell penetrating peptide (CPP).

[0876] Also described herein are methods for developing or designing a composition, system, optionally a composition, system, based therapy or therapeutic, comprising (a) selecting for a (therapeutic) locus of interest ωRNA target sites, wherein said target sites have minimal sequence variation across a population, and from said selected target sites subselecting target sites, wherein a ωRNA directed against said target sites recognizes a minimal number of off-target sites across said population, or (b) selecting for a (therapeutic) locus of interest ωRNA target sites, wherein said target sites have minimal sequence variation across a population, or selecting for a (therapeutic) locus of interest ωRNA target sites, wherein a ωRNA directed against said target sites recognizes a minimal number of off-target sites across said population, and optionally estimating the number of (sub)selected target sites needed to treat or otherwise modulate or manipulate a population, and optionally validating one or more of the (sub)selected target sites for an individual subject, optionally designing one or more ωRNA recognizing one or more of said (sub)selected target sites.

[0877] In one embodiment, the method for developing or designing a ωRNA for use in a composition, system, optionally a composition, system, based therapy or therapeutic, can include (a) selecting for a (therapeutic) locus of interest ωRNA target sites, wherein said target sites have minimal sequence variation across a population, and from said selected target sites subselecting target sites, wherein a gRNA directed against said target sites recognizes a minimal number of off-target sites across said population, or (b) selecting for a (therapeutic) locus of interest gRNA target sites, wherein said target sites have minimal sequence variation across a population, or selecting for a (therapeutic) locus of interest gRNA target sites, wherein a gRNA directed against said target sites recognizes a minimal number of off-target sites across said population, and optionally estimating the number of (sub)selected target sites needed to treat or otherwise modulate or manipulate a population, optionally validating one or more of the (sub)selected target sites for an individual subject, optionally designing one or more gRNA recognizing one or more of said (sub)selected target sites.

[0878] In one embodiment, thee method for developing or designing a composition, system, optionally a composition, system, based therapy or therapeutic in a population, can include (a) selecting for a (therapeutic) locus of interest reprogrammable spacer target sites, wherein said target sites have minimal sequence variation across a population, and from said selected target sites subselecting target sites, wherein a ωRNA directed against said target sites recognizes a minimal number of off-target sites across said population, or (b) selecting for a (therapeutic) locus of interest ωRNA reprogrammable spacer target sites, wherein said target sites have minimal sequence variation across a population, or selecting for a (therapeutic) locus of interest ωRNA reprogrammable spacer target sites, wherein a ωRNA directed against said target sites recognizes a minimal number of off-target sites across said population, and optionally estimating the number of (sub)selected target sites needed to treat or otherwise modulate or manipulate a population, optionally validating one or more of the (sub)selected target sites for an individual subject, optionally designing one or more ωRNA recognizing one or more of said (sub)selected target sites.

[0879] In one embodiment the method for developing or designing a gRNA for use in a composition, system, optionally a composition, system, based therapy or therapeutic in a population, can include (a) selecting for a (therapeutic) locus of interest gRNA target sites, wherein said target sites have minimal sequence variation across a population, and from said selected target sites subselecting target sites, wherein a gRNA directed against said target sites recognizes a minimal number of off-target sites across said population, or (b) selecting for a (therapeutic) locus of interest gRNA target sites, wherein said target sites have minimal sequence variation across a population, or selecting for a (therapeutic) locus of interest gRNA target sites, wherein a gRNA directed against said target sites recognizes a minimal number of off-target sites across said population, and optionally estimating the number of (sub)selected target sites needed to treat or otherwise modulate or manipulate a population, optionally validating one or more of the (sub)selected target sites for an individual subject, optionally designing one or more ωRNA reprogrammable spacer recognizing one or more of said (sub)selected target sites.

[0880] In one embodiment, the method for developing or designing a composition, system, such as a composition, system, based therapy or therapeutic, optionally in a population; or for developing or designing a ωRNA reprogrammable spacer for use in a composition, system, optionally a composition, system, based therapy or therapeutic, optionally in a population, can include selecting a set of target sequences for one or more loci in a target population, wherein the target sequences do not contain variants occurring above a threshold allele frequency in the target population (i.e. platinum target sequences); removing from said selected (platinum) target sequences any target sequences having high frequency off-target candidates (relative to other (platinum) targets in the set) to define a final target sequence set; preparing one or more, such as a set of compositions, systems, based on the final target sequence set, optionally wherein a number of composition prepared is based (at least in part) on the size of a target population.

[0881] In an embodiment, off-target candidates/off-targets, TAM restrictiveness, target cleavage efficiency, or effector protein specificity is identified or determined using a sequencing-based double-strand break (DSB) detection assay, such as described herein elsewhere. In an embodiment, off-target candidates/off-targets are identified or determined using a sequencing-based double-strand break (DSB) detection assay, such as described herein elsewhere. In an embodiment, off-targets, or off target candidates have at least 1, preferably 1-3, mismatches or (distal) TAM mismatches, such as 1 or more, such as 1, 2, 3, or more (distal) TAM mismatches. In an embodiment, sequencing-based DSB detection assay comprises labeling a site of a DSB with an adapter comprising a primer binding site, labeling a site of a DSB with a barcode or unique molecular identifier, or combination thereof, as described herein elsewhere.

[0882] It will be understood that the reprogrammable spacer sequence of the ωRNA is 100% complementary to the target site, i.e. does not comprise any mismatch with the target site. It will be further understood that “recognition” of an (off-)target site by a reprogrammable spacer presupposes composition, system, functionality, i.e. an (off-)target site is only recognized by a reprogrammable spacer RNA if binding of the reprogrammable spacer RNA to the (off-)target site leads to composition, system, activity (such as induction of single or double strand DNA cleavage, transcriptional modulation, etc.).

[0883] In an embodiment, the target sites having minimal sequence variation across a population are characterized by absence of sequence variation in at least 99%, preferably at least 99.9%, more preferably at least 99.99% of the population. In an embodiment, optimizing target location comprises selecting target sequences or loci having an absence of sequence variation in at least 99%, %, preferably at least 99.9%, more preferably at least 99.99% of a population. These targets are referred to herein elsewhere also as “platinum targets”. In an embodiment, said population comprises at least 1000 individuals, such as at least 5000 individuals, such as at least 10000 individuals, such as at least 50000 individuals.

[0884] In an embodiment, the off-target sites are characterized by at least one mismatch between the off-target site and the ωRNA. In an embodiment, the off-target sites are characterized by at most five, preferably at most four, more preferably at most three mismatches between the off-target site and the ωRNA. In an embodiment, the off-target sites are characterized by at least one mismatch between the off-target site and the ωRNA and by at most five, preferably at most four, more preferably at most three mismatches between the off-target site and the ωRNA.

[0885] In an embodiment, said minimal number of off-target sites across said population is determined for high-frequency haplotypes in said population. In an embodiment, said minimal number of off-target sites across said population is determined for high-frequency haplotypes of the off-target site locus in said population. In an embodiment, said minimal number of off-target sites across said population is determined for high-frequency haplotypes of the target site locus in said population. In an embodiment, the high-frequency haplotypes are characterized by occurrence in at least 0.1% of the population.

[0886] In an embodiment, the number of (sub)selected target sites needed to treat a population is estimated based on based low frequency sequence variation, such as low frequency sequence variation captured in large scale sequencing datasets. In an embodiment, the number of (sub)selected target sites needed to treat a population of a given size is estimated.

[0887] In an embodiment, the method further comprises obtaining genome sequencing data of a subject to be treated; and treating the subject with a composition, system, selected from the set of compositions, systems, wherein the composition, system, selected is based (at least in part) on the genome sequencing data of the individual. In an embodiment, the ((sub)selected) target is validated by genome sequencing, preferably whole genome sequencing.

[0888] In an embodiment, target sequences or loci as described herein are (further) selected based on optimization of one or more parameters, such as TAM type (natural or modified), TAM nucleotide content, TAM length, target sequence length, TAM restrictiveness, target cleavage efficiency, and target sequence position within a gene, a locus or other genomic region. Methods of optimization are discussed in greater detail elsewhere herein.

[0889] In an embodiment, target sequences or loci as described herein are (further) selected based on optimization of one or more of target loci location, target length, target specificity, and TAM characteristics. As used herein, TAM characteristics may comprise for instance TAM sequence, TAM length, and/or TAM GC contents. In an embodiment, optimizing TAM characteristics comprises optimizing nucleotide content of a TAM. In an embodiment, optimizing nucleotide content of TAM is selecting a TAM with a motif that maximizes abundance in the one or more target loci, minimizes mutation frequency, or both. Minimizing mutation frequency can for instance be achieved by selecting TAM sequences devoid of or having low or minimal CpG.

[0890] In an embodiment, the effector protein for each composition and system, in the set of compositions, systems, is selected based on optimization of one or more parameters selected from the group consisting of, effector protein size, ability of effector protein to access regions of high chromatin accessibility, degree of uniform enzyme activity across genomic targets, epigenetic tolerance, mismatch/budge tolerance, effector protein specificity, effector protein stability or half-life, effector protein immunogenicity or toxicity. Methods of optimization are discussed in greater detail elsewhere herein.

### Optimization of the Systems

[0891] The methods of the present invention can involve optimization of selected parameters or variables associated with the composition, system, and/or its functionality, as described herein further elsewhere. Optimization of the composition, system, in the methods as described herein may depend on the target(s), such as the therapeutic target or therapeutic targets, the mode or type of composition, system, modulation, such as composition, system, based therapeutic target(s) modulation, modification, or manipulation, as well as the delivery of the composition, system, components. One or more targets may be selected, depending on the genotypic and/or phenotypic outcome. For instance, one or more therapeutic targets may be selected, depending on (genetic) disease etiology or the desired therapeutic outcome. The (therapeutic) target(s) may be a single gene, locus, or other genomic site, or may be multiple genes, loci or other genomic sites. As is known in the art, a single gene, locus, or other genomic site may be targeted more than once, such as by use of multiple ωRNAs, or ωRNA scaffold and multiple reprogrammable spacers.

[0892] The activity of the composition and/or system, such as IscB polypeptide nuclease-based therapy or therapeutics may involve target disruption, such as target mutation, such as leading to gene knockout. The activity of the composition and/or system, such as IscB polypeptide nuclease-based therapy or therapeutics may involve replacement of particular target sites, such as leading to target correction. IscB polypeptide or CRISPR-associated IscB polypeptide nuclease-based therapy or therapeutics may involve removal of particular target sites, such as leading to target deletion. The activity of the composition and/or system, such as IscB polypeptide or CRISPR-associated IscB polypeptide nuclease-based therapy or therapeutics may involve modulation of target site functionality, such as target site activity or accessibility, leading for instance to (transcriptional and/or epigenetic) gene or genomic region activation or gene or genomic region silencing. The skilled person will understand that modulation of target site functionality may involve IscB polypeptide or CRISPR-associated IscB polypeptide nuclease mutation (such as for instance generation of a catalytically inactive IscB polypeptide or CRISPR-associated IscB polypeptide nuclease) and/or functionalization (such as for instance fusion of the IscB polypeptide or CRISPR-associated IscB polypeptide nuclease with a heterologous functional domain, such as a transcriptional activator or repressor), as described herein elsewhere.

[0893] Accordingly, in an aspect, the invention relates to a method as described herein, comprising selection of one or more (therapeutic) target, selecting one or more functionality of the composition and/or system, and optimization of selected parameters or variables associated with the composition and/or its functionality. In a related aspect, the invention relates to a method as described herein, comprising (a) selecting one or more (therapeutic) target loci, (b) selecting one or more composition functionalities, (c) optionally selecting one or more modes of delivery, and preparing, developing, or designing a composition herein selected based on steps (a)-(c).

[0894] In an embodiment, the functionality of the composition and/or system comprises genomic mutation. In an embodiment, the functionality of the composition and/or system comprises single genomic mutation. In an embodiment, the functionality of the composition and/or system functionality comprises multiple genomic mutation. In an embodiment, the functionality of the composition and/or system comprises gene knockout. In an embodiment, the functionality of the composition and/or system comprises single gene knockout. In an embodiment, the functionality of the composition and/or system comprises multiple gene knockout. In an embodiment, the functionality of the composition and/or system comprises gene correction. In an embodiment, the functionality of the composition and/or system comprises single gene correction. In an embodiment, the functionality of the composition and/or system comprises multiple gene correction. In an embodiment, the functionality of the composition and/or system comprises genomic region correction. In an embodiment, the functionality of the composition and/or system comprises single genomic region correction. In an embodiment, the functionality of the composition and/or system comprises multiple genomic region correction. In an embodiment, the functionality of the composition and/or system comprises gene deletion. In an embodiment, the functionality of the composition and/or system comprises single gene deletion. In an embodiment, the functionality of the composition and/or system comprises multiple gene deletion. In an embodiment, the functionality of the composition and/or system comprises genomic region deletion. In an embodiment, the functionality of the composition and/or system comprises single genomic region deletion. In an embodiment, the functionality of the composition and/or system comprises multiple genomic region deletion. In an embodiment, the functionality of the composition and/or system comprises modulation of gene or genomic region functionality. In an embodiment, the functionality of the composition and/or system comprises modulation of single gene or genomic region functionality. In an embodiment, the functionality of the composition and/or system comprises modulation of multiple gene or genomic region functionality. In an embodiment, the functionality of the composition and/or system comprises gene or genomic region functionality, such as gene or genomic region activity. In an embodiment, the functionality of the composition and/or system comprises single gene or genomic region functionality, such as gene or genomic region activity. In an embodiment, the functionality of the composition and/or system comprises multiple gene or genomic region functionality, such as gene or genomic region activity. In an embodiment, the functionality of the composition and/or system comprises modulation gene activity or accessibility optionally leading to transcriptional and/or epigenetic gene or genomic region activation or gene or genomic region silencing. In an embodiment, the functionality of the composition and/or system comprises modulation single gene activity or accessibility optionally leading to transcriptional and/or epigenetic gene or genomic region activation or gene or genomic region silencing. In an embodiment, the functionality of the composition and/or system comprises modulation multiple gene activity or accessibility optionally leading to transcriptional and/or epigenetic gene or genomic region activation or gene or genomic region silencing.

[0895] Optimization of selected parameters or variables in the methods as described herein may result in optimized or improved the system, such as IscB polypeptide or CRISPR-associated IscB polypeptide nuclease-based therapy or therapeutic, specificity, efficacy, and/or safety. In an embodiment, one or more of the following parameters or variables are taken into account, are selected, or are optimized in the methods of the invention as described herein: IscB polypeptide or CRISPR-associated IscB polypeptide nuclease allosteric interactions, IscB polypeptide nuclease functional domains and functional domain interactions, IscB polypeptide or CRISPR-associated IscB polypeptide nuclease specificity, hRNA specificity, composition specificity, TAM restrictiveness, TAM type (natural or modified), TAM nucleotide content, TAM length, IscB polypeptide or CRISPR-associated IscB polypeptide nuclease activity, hRNA activity, IscB polypeptide or CRISPR-associated IscB polypeptide nuclease/guide complex activity, target cleavage efficiency, target site selection, target sequence length, ability of effector protein to access regions of high chromatin accessibility, degree of uniform enzyme activity across genomic targets, epigenetic tolerance, mismatch/budge tolerance, IscB polypeptide or CRISPR-associated IscB polypeptide nuclease stability, IscB polypeptide or CRISPR-associated IscB polypeptide or CRISPR-associated IscB polypeptide nuclease mRNA stability, gRNA stability, IscB polypeptide or CRISPR-associated IscB polypeptide nuclease complex stability, IscB polypeptide or CRISPR-associated IscB polypeptide nuclease protein or mRNA immunogenicity or toxicity, gRNA immunogenicity or toxicity, IscB polypeptide or CRISPR-associated IscB polypeptide nuclease immunogenicity or toxicity, IscB polypeptide or CRISPR-associated IscB polypeptide nuclease or mRNA dose or titer, gRNA dose or titer, dose or titer, IscB polypeptide nuclease protein size, IscB polypeptide nuclease expression level, gRNA expression level, IscB polypeptide or CRISPR-associated IscB polypeptide nuclease expression level, IscB polypeptide or CRISPR-associated IscB polypeptide nuclease spatiotemporal expression, gRNA spatiotemporal expression, IscB polypeptide or CRISPR-associated IscB polypeptide nuclease/hRNA spatiotemporal expression.

[0896] By means of example, and without limitation, parameter or variable optimization may be achieved as follows. IscB polypeptide nuclease specificity may be optimized by selecting the most specific IscB polypeptide or CRISPR-associated IscB polypeptide nuclease, e.g. IscB polypeptide or CRISPR-associated IscB polypeptide. This may be achieved for instance by selecting the most specific IscB polypeptide nuclease orthologue or by specific IscB polypeptide or CRISPR-associated IscB polypeptide or CRISPR-associated IscB polypeptide nuclease mutations which increase specificity. ωRNA specificity may be optimized by selecting the most specific ωRNA. This can be achieved for instance by selecting ωRNA having low homology, i.e. at least one or preferably more, such as at least 2, or preferably at least 3, mismatches to off-target sites. The specificity may be optimized by increasing IscB polypeptide or CRISPR-associated IscB polypeptide nuclease specificity and/or ωRNA specificity as above. TAM restrictiveness may be optimized by selecting a IscB polypeptide or CRISPR-associated IscB polypeptide nuclease having to most restrictive TAM recognition. This can be achieved for instance by selecting a IscB polypeptide or CRISPR-associated IscB polypeptide nuclease ortholog having more restrictive TAM recognition or by specific IscB polypeptide or CRISPR-associated IscB polypeptide or CRISPR-associated IscB polypeptide mutations which increase or alter TAM restrictiveness. TAM type may be optimized for instance by selecting the appropriate IscB polypeptide or CRISPR-associated IscB polypeptide nuclease, such as the appropriate IscB polypeptide or CRISPR-associated IscB polypeptide nuclease recognizing a desired TAM type. The IscB polypeptide or CRISPR-associated IscB polypeptide nuclease or TAM type may be naturally occurring or may for instance be optimized based on IscB polypeptide or CRISPR-associated IscB polypeptide nuclease mutants having an altered TAM recognition, or TAM recognition repertoire. TAM nucleotide content may for instance be optimized by selecting the appropriate IscB polypeptide or CRISPR-associated IscB polypeptide nuclease, such as the appropriate IscB polypeptide or CRISPR-associated IscB polypeptide nuclease recognizing a desired TAM nucleotide content. The IscB polypeptide or CRISPR-associated IscB polypeptide nuclease or TAM type may be naturally occurring or may for instance be optimized based on IscB polypeptide or CRISPR-associated IscB polypeptide nuclease mutants having an altered TAM recognition, or TAM recognition repertoire. TAM length may for instance be optimized by selecting the appropriate IscB polypeptide nuclease, such as the appropriate IscB polypeptide or CRISPR-associated IscB polypeptide nuclease recognizing a desired TAM nucleotide length. The IscB polypeptide or CRISPR-associated IscB polypeptide nuclease or TAM type may be naturally occurring or may for instance be optimized based on IscB polypeptide nuclease mutants having an altered TAM recognition, or TAM recognition repertoire.

[0897] Target length or target sequence length may be optimized, for instance, by selecting the appropriate IscB polypeptide or CRISPR-associated IscB polypeptide nuclease, such as the appropriate IscB polypeptide nuclease recognizing a desired target or target sequence nucleotide length. Alternatively, or in addition, the target (sequence) length may be optimized by providing a target having a length deviating from the target (sequence) length typically associated with the IscB polypeptide nuclease, such as the naturally occurring IscB polypeptide or CRISPR-associated IscB polypeptide nuclease. The IscB polypeptide or CRISPR-associated IscB polypeptide nuclease or target (sequence) length may be naturally occurring or may for instance be optimized based on IscB polypeptide or CRISPR-associated IscB polypeptide nuclease mutants having an altered target (sequence) length recognition, or target (sequence) length recognition repertoire. For instance, increasing or decreasing target (sequence) length may influence target recognition and/or off-target recognition. IscB polypeptide or CRISPR-associated IscB polypeptide nuclease activity may be optimized by selecting the most active IscB polypeptide or CRISPR-associated IscB polypeptide nuclease. This may be achieved for instance by selecting the most active IscB polypeptide or CRISPR-associated IscB polypeptide nuclease ortholog or by specific IscB polypeptide or CRISPR-associated IscB polypeptide nuclease mutations which increase activity. The ability of the IscB polypeptide or CRISPR-associated IscB polypeptide nuclease protein to access regions of high chromatin accessibility, may be optimized by selecting the appropriate IscB polypeptide or CRISPR-associated IscB polypeptide nuclease or mutant thereof, and can consider the size of the IscB polypeptide or CRISPR-associated IscB polypeptide nuclease, charge, or other dimensional variables etc. The degree of uniform IscB polypeptide or CRISPR-associated IscB polypeptide nuclease activity may be optimized by selecting the appropriate IscB polypeptide nuclease or mutant thereof, and can consider IscB polypeptide or CRISPR-associated IscB polypeptide or CRISPR-associated IscB polypeptide nuclease specificity and/or activity, TAM specificity, target length, mismatch tolerance, epigenetic tolerance, IscB polypeptide or CRISPR-associated IscB polypeptide nuclease and/or ωRNA stability and/or half-life, IscB polypeptide or CRISPR-associated IscB polypeptide nuclease and/or ωRNA immunogenicity and/or toxicity, etc. ωRNA activity may be optimized by selecting the most active ωRNA. In one embodiment, this can be achieved by increasing ωRNA stability through RNA modification. compositions activity may be optimized by increasing IscB polypeptide or CRISPR-associated IscB polypeptide or CRISPR-associated IscB polypeptide nuclease activity and/or ωRNA activity as above.

[0898] The target site selection may be optimized by selecting the optimal position of the target site within a gene, locus or other genomic region. The target site selection may be optimized by optimizing target location comprises selecting a target sequence with a gene, locus, or other genomic region having low variability. This may be achieved for instance by selecting a target site in an early and/or conserved exon or domain (i.e. having low variability, such as polymorphisms, within a population).

[0899] In an embodiment, optimizing target (sequence) length comprises selecting a target sequence within one or more target loci between 5 and 25 nucleotides. In an embodiment, a target sequence is 20 nucleotides.

[0900] In an embodiment, optimizing target specificity comprises selecting targets loci that minimize off-target candidates.

[0901] In one embodiment, the target site may be selected by minimization of off-target effects (e.g. off-targets qualified as having 1-5, 1-4, or preferably 1-3 mismatches compared to target and/or having one or more TAM mismatches, such as distal TAM mismatches), preferably also considering variability within a population. IscB polypeptide nuclease stability may be optimized by selecting IscB polypeptide nuclease having appropriate half-life, such as preferably a short half-life while still capable of maintaining sufficient activity. In one embodiment, this can be achieved by selecting an appropriate IscB polypeptide nuclease orthologue having a specific half-life or by specific IscB polypeptide nuclease mutations or modifications which affect half-life or stability, such as inclusion (e.g. fusion) of stabilizing or destabilizing domains or sequences. IscB polypeptide nuclease mRNA stability may be optimized by increasing or decreasing IscB polypeptide nuclease mRNA stability. In one embodiment, this can be achieved by increasing or IscB polypeptide or CRISPR-associated IscB polypeptide nuclease mRNA stability through mRNA modification. hRNA stability may be optimized by increasing or decreasing ωRNA stability. In one embodiment, this can be achieved by increasing or decreasing ωRNA stability through RNA modification. The stability may be optimized by increasing or decreasing IscB polypeptide or CRISPR-associated IscB polypeptide nuclease stability and/or gRNA stability as above. IscB polypeptide nuclease protein or mRNA immunogenicity or toxicity may be optimized by decreasing IscB polypeptide or CRISPR-associated IscB polypeptide nuclease or mRNA immunogenicity or toxicity. In one embodiment, this can be achieved by mRNA or protein modifications. Similarly, in case of DNA based expression systems, DNA immunogenicity or toxicity may be decreased. ωRNA immunogenicity or toxicity may be optimized by decreasing hRNA immunogenicity or toxicity. In one embodiment, this can be achieved by ωRNA modifications. Similarly, in case of DNA based expression systems, DNA immunogenicity or toxicity may be decreased. The immunogenicity or toxicity may be optimized by decreasing IscB polypeptide or CRISPR-associated IscB polypeptide nuclease immunogenicity or toxicity and/or ωRNA immunogenicity or toxicity as above, or by selecting the least immunogenic or toxic IscB polypeptide or CRISPR-associated IscB polypeptide nuclease/hRNA combination. Similarly, in case of DNA based expression systems, DNA immunogenicity or toxicity may be decreased. IscB polypeptide or CRISPR-associated IscB polypeptide nuclease protein or mRNA dose or titer may be optimized by selecting dosage or titer to minimize toxicity and/or maximize specificity and/or efficacy. ωRNA dose or titer may be optimized by selecting dosage or titer to minimize toxicity and/or maximize specificity and/or efficacy. The composition dose or titer may be optimized by selecting dosage or titer to minimize toxicity and/or maximize specificity and/or efficacy. The IscB polypeptide or CRISPR-associated IscB polypeptide nuclease size may be optimized by selecting minimal protein size to increase efficiency of delivery, in particular for virus mediated delivery. IscB polypeptide or CRISPR-associated IscB polypeptide nuclease, ωRNA, or complex thereof expression level may be optimized by limiting (or extending) the duration of expression and/or limiting (or increasing) expression level. This may be achieved for instance by using self-inactivating compositions, systems, such as including a self-targeting (e.g. IscB polypeptide or CRISPR-associated IscB polypeptide nuclease targeting) gRNA, by using viral vectors having limited expression duration, by using appropriate promoters for low (or high) expression levels, by combining different delivery methods for individual IscB polypeptide or CRISPR-associated IscB polypeptide system components, such as virus mediated delivery of IscB polypeptide or CRISPR-associated IscB polypeptide nuclease encoding nucleic acid combined with non-virus mediated delivery of ωRNA, or virus mediated delivery of ωRNA combined with non-virus mediated delivery of IscB polypeptide or CRISPR-associated IscB polypeptide or CRISPR-associated IscB polypeptide nuclease or mRNA. IscB polypeptide nuclease, ωRNA, or IscB polypeptide or CRISPR-associated IscB polypeptide complex spatiotemporal expression may be optimized by appropriate choice of conditional and/or inducible expression systems, including controllable IscB polypeptide or CRISPR-associated IscB polypeptide nuclease activity optionally a destabilized IscB polypeptide or CRISPR-associated IscB polypeptide nuclease and/or a split IscB polypeptide or CRISPR-associated IscB polypeptide nuclease, and/or cell- or tissue-specific expression systems.

[0902] In an aspect, the invention relates to a method as described herein, comprising selection of one or more (therapeutic) target, selecting the functionality of the composition and/or system, selecting composition mode of delivery, selecting composition delivery vehicle or expression system, and optimization of selected parameters or variables associated with the composition and/or its functionality, optionally wherein the parameters or variables are one or more selected from IscB polypeptide or CRISPR-associated IscB polypeptide nuclease specificity, ωRNA specificity, IscB polypeptide or CRISPR-associated IscB polypeptide complex specificity, TAM restrictiveness, TAM type (natural or modified), TAM nucleotide content, TAM length, IscB polypeptide or CRISPR-associated IscB polypeptide nuclease activity, gRNA activity, IscB polypeptide or CRISPR-associated IscB polypeptide nuclease/hRNA complex activity, target cleavage efficiency, target site selection, target sequence length, ability of effector protein to access regions of high chromatin accessibility, degree of uniform enzyme activity across genomic targets, epigenetic tolerance, mismatch/budge tolerance, IscB polypeptide or CRISPR-associated IscB polypeptide or CRISPR-associated IscB polypeptide nuclease stability, IscB polypeptide nuclease mRNA stability, ωRNA stability, IscB polypeptide or CRISPR-associated IscB polypeptide complex stability, IscB polypeptide or CRISPR-associated IscB polypeptide nuclease protein or mRNA immunogenicity or toxicity, ωRNA immunogenicity or toxicity, IscB polypeptide or CRISPR-associated IscB polypeptide nuclease/ωRNA complex immunogenicity or toxicity, IscB polypeptide or CRISPR-associated IscB polypeptide nuclease protein or mRNA dose or titer, ωRNA dose or titer, IscB polypeptide or CRISPR-associated IscB polypeptide complex dose or titer, IscB polypeptide or CRISPR-associated IscB polypeptide nuclease protein size, IscB polypeptide or CRISPR-associated IscB polypeptide nuclease expression level, ωRNA expression level, IscB polypeptide or CRISPR-associated IscB polypeptide nuclease/ωRNA molecule complex expression level, IscB polypeptide or CRISPR-associated IscB polypeptide nuclease spatiotemporal expression, ωRNA spatiotemporal expression, IscB polypeptide or CRISPR-associated IscB polypeptide nuclease/ωRNA complex spatiotemporal expression.

[0903] It will be understood that the parameters or variables to be optimized as well as the nature of optimization may depend on the (therapeutic) target, the functionality of the composition and/or system, the system mode of delivery, and/or the composition delivery vehicle or expression system.

[0904] In an aspect, the invention relates to a method as described herein, comprising optimization of ωRNA specificity at the population level. Preferably, said optimization of ωRNA specificity comprises minimizing ωRNA target site sequence variation across a population and/or minimizing ωRNA off-target incidence across a population.

[0905] In one embodiment, optimization can result in selection of a IscB polypeptide or CRISPR-associated IscB polypeptide nuclease that is naturally occurring or is modified. In one embodiment, optimization can result in selection of a IscB polypeptide or CRISPR-associated IscB polypeptide nuclease that has nuclease, nickase, deaminase, transposase, and/or has one or more effector functionalities deactivated or eliminated. In one embodiment, optimizing a TAM specificity can include selecting a IscB polypeptide or CRISPR-associated IscB polypeptide nuclease with a modified TAM specificity. In one embodiment, optimizing can include selecting a IscB polypeptide or CRISPR-associated IscB polypeptide nuclease having a minimal size. In an embodiment, optimizing effector protein stability comprises selecting an effector protein having a short half-life while maintaining sufficient activity, such as by selecting an appropriate IscB polypeptide nuclease orthologue having a specific half-life or stability. In an embodiment, optimizing immunogenicity or toxicity comprises minimizing effector protein immunogenicity or toxicity by protein modifications. In an embodiment, optimizing functional specific comprises selecting a protein effector with reduced tolerance of mismatches and/or bulges between the guide RNA and one or more target loci.

[0906] In an embodiment, optimizing efficacy comprises optimizing overall efficiency, epigenetic tolerance, or both. In an embodiment, maximizing overall efficiency comprises selecting an effector protein with uniform enzyme activity across target loci with varying chromatin complexity, selecting an effector protein with enzyme activity limited to areas of open chromatin accessibility. In an embodiment, chromatin accessibility is measured using one or more of ATAC-seq, or a DNA-proximity ligation assay. In an embodiment, optimizing epigenetic tolerance comprises optimizing methylation tolerance, epigenetic mark competition, or both. In an embodiment, optimizing methylation tolerance comprises selecting an effector protein that modify methylated DNA. In an embodiment, optimizing epigenetic tolerance comprises selecting an effector protein unable to modify silenced regions of a chromosome, selecting an effector protein able to modify silenced regions of a chromosome, or selecting target loci not enriched for epigenetic markers

[0907] In an embodiment, selecting an optimized guide RNA comprises optimizing gRNA stability, gRNA immunogenicity, or both, or other gRNA associated parameters or variables as described herein elsewhere.

[0908] In an embodiment, optimizing gRNA stability and/or gRNA immunogenicity comprises RNA modification, or other gRNA associated parameters or variables as described herein elsewhere. In an embodiment, the modification comprises removing 1-3 nucleotides form the 3′ end of a target complementarity region of the gRNA. In an embodiment, modification comprises an extended gRNA and/or trans RNA/DNA element that create stable structures in the gRNA that compete with gRNA base pairing at a target of off-target loci, or extended complimentary nucleotides between the gRNA and target sequence, or both.

[0909] In an embodiment, the mode of delivery comprises delivering gRNA and/or IscB polypeptide or CRISPR-associated IscB polypeptide nuclease, delivering gRNA and/or IscB polypeptide or CRISPR-associated IscB polypeptide nuclease mRNA, or delivery gRNA and/or IscB polypeptide nuclease as a DNA based expression system. In an embodiment, the mode of delivery further comprises selecting a delivery vehicle and/or expression systems from the group consisting of liposomes, lipid particles, nanoparticles, biolistics, or viral-based expression/delivery systems. In an embodiment, expression is spatiotemporal expression is optimized by choice of conditional and/or inducible expression systems, including controllable IscB polypeptide nuclease activity optionally a destabilized IscB polypeptide or CRISPR-associated IscB polypeptide or CRISPR-associated IscB polypeptide and/or a split IscB polypeptide nuclease, and/or cell- or tissue-specific expression system.

[0910] The methods as described herein may further involve selection of the mode of delivery. In an embodiment, ωRNA and/or IscB polypeptide or CRISPR-associated IscB polypeptide nuclease are or are to be delivered. In an embodiment, ωRNA and/or IscB polypeptide or CRISPR-associated IscB polypeptide nuclease mRNA are or are to be delivered. In an embodiment, ωRNA and/or IscB polypeptide or CRISPR-associated IscB polypeptide nuclease provided in a DNA-based expression system are or are to be delivered. In an embodiment, delivery of the individual system components comprises a combination of the above modes of delivery. In an embodiment, delivery comprises delivering ωRNA and/or IscB polypeptide or CRISPR-associated IscB polypeptide nuclease protein, delivering ωRNA and/or IscB polypeptide or CRISPR-associated IscB polypeptide nuclease mRNA, or delivering ωRNA and/or IscB polypeptide or CRISPR-associated IscB polypeptide nuclease as a DNA based expression system.

[0911] The methods as described herein may further involve selection of the composition delivery vehicle and/or expression system. Delivery vehicles and expression systems are described herein elsewhere. By means of example, delivery vehicles of nucleic acids and/or proteins include nanoparticles, liposomes, etc. Delivery vehicles for DNA, such as DNA-based expression systems include for instance biolistics, viral based vector systems (e.g. adenoviral, AAV, lentiviral), etc. the skilled person will understand that selection of the mode of delivery, as well as delivery vehicle or expression system may depend on for instance the cell or tissues to be targeted. In an embodiment, the delivery vehicle and/or expression system for delivering the compositions, systems, or components thereof comprises liposomes, lipid particles, nanoparticles, biolistics, or viral-based expression/delivery systems.

### Considerations for Therapeutic Applications

[0912] A consideration in genome editing therapy is the choice of sequence-specific nuclease, such as a variant of a IscB polypeptide nuclease. Each nuclease variant may possess its own unique set of strengths and weaknesses, many of which must be balanced in the context of treatment to maximize therapeutic benefit. For a specific editing therapy to be efficacious, a sufficiently high level of modification must be achieved in target cell populations to reverse disease symptoms. This therapeutic modification ‘threshold’ is determined by the fitness of edited cells following treatment and the amount of gene product necessary to reverse symptoms. With regard to fitness, editing creates three potential outcomes for treated cells relative to their unedited counterparts: increased, neutral, or decreased fitness. In the case of increased fitness, corrected cells may be able and expand relative to their diseased counterparts to mediate therapy. In this case, where edited cells possess a selective advantage, even low numbers of edited cells can be amplified through expansion, providing a therapeutic benefit to the patient. Where the edited cells possess no change in fitness, an increase the therapeutic modification threshold can be warranted. As such, significantly greater levels of editing may be needed to treat diseases, where editing creates a neutral fitness advantage, relative to diseases where editing creates increased fitness for target cells. If editing imposes a fitness disadvantage, as would be the case for restoring function to a tumor suppressor gene in cancer cells, modified cells would be outcompeted by their diseased counterparts, causing the benefit of treatment to be low relative to editing rates. This may be overcome with supplemental therapies to increase the potency and/or fitness of the edited cells relative to the diseased counterparts.

[0913] In addition to cell fitness, the amount of gene product necessary to treat disease can also influence the minimal level of therapeutic genome editing that can treat or prevent a disease or a symptom thereof. In cases where a small change in the gene product levels can result in significant changes in clinical outcome, the minimal level of therapeutic genome editing is less relative to cases where a larger change in the gene product levels are needed to gain a clinically relevant response. In one embodiment, the minimal level of therapeutic genome editing can range from 0.1 to 1%, 1-5%, 5-10%, 10-15%, 15-20%, 20-25%, 25-30%, 30-35%, 35-40%, 40-45%. 45-50%, or 50-55%. Thus, where a small change in gene product levels can influence clinical outcomes and diseases where there is a fitness advantage for edited cells, are ideal targets for genome editing therapy, as the therapeutic modification threshold is low enough to permit a high chance of success.

[0914] The activity of NHEJ and HDR DSB repair can vary by cell type and cell state. NHEJ is not highly regulated by the cell cycle and is efficient across cell types, allowing for high levels of gene disruption in accessible target cell populations. In contrast, HDR acts primarily during S/G2 phase, and is therefore restricted to cells that are actively dividing, limiting treatments that require precise genome modifications to mitotic cells [Ciccia, A. & Elledge, S. J. Molecular cell 40, 179-204 (2010); Chapman, J. R., et al. Molecular cell 47, 497-510 (2012)].

[0915] The efficiency of correction via HDR may be controlled by the epigenetic state or sequence of the targeted locus, or the specific repair template configuration (single vs. double stranded, long vs. short homology arms) used [Hacein-Bey-Abina, S., et al. The New England journal of medicine 346, 1185-1193 (2002); Gaspar, H. B., et al. Lancet 364, 2181-2187 (2004); Beumer, K. J., et al. G3 (2013)]. The relative activity of NHEJ and HDR machineries in target cells may also affect gene correction efficiency, as these pathways may compete to resolve DSBs [Beumer, K. J., et al. Proceedings of the National Academy of Sciences of the United States of America 105, 19821-19826 (2008)]. HDR also imposes a delivery challenge not seen with NHEJ strategies, as it uses the concurrent delivery of nucleases and repair templates. Thus, these differences can be kept in mind when designing, optimizing, and/or selecting a IscB polypeptide nuclease based therapeutic as described in greater detail elsewhere herein.

[0916] IscB polypeptide or CRISPR-associated IscB polypeptide nuclease-based polynucleotide modification application can include combinations of proteins, small RNA molecules, and/or repair templates, and can make, In one embodiment, delivery of these multiple parts substantially more challenging than, for example, traditional small molecule therapeutics. Two main strategies for delivery of compositions, systems, and components thereof have been developed: ex vivo and in vivo. In one embodiment of ex vivo treatments, diseased cells are removed from a subject, edited and then transplanted back into the patient. In other embodiments, cells from a healthy allogeneic donor are collected, modified using a composition or component thereof, to impart various functionalities and/or reduce immunogenicity, and administered to an allogeneic recipient in need of treatment. Ex vivo editing has the advantage of allowing the target cell population to be well defined and the specific dosage of therapeutic molecules delivered to cells to be specified. The latter consideration may be particularly important when off-target modifications are a concern, as titrating the amount of nuclease may decrease such mutations (Hsu et al., 2013). Another advantage of ex vivo approaches is the typically high editing rates that can be achieved, due to the development of efficient delivery systems for proteins and nucleic acids into cells in culture for research and gene therapy applications.

[0917] In vivo polynucleotide modification via compositions, systems, and/or components thereof involves direct delivery of the compositions, systems, and/or components thereof to cell types in their native tissues. In vivo polynucleotide modification via compositions, systems, and/or components thereof allows diseases in which the affected cell population is not amenable to ex vivo manipulation to be treated. Furthermore, delivering compositions, systems, and/or components thereof to cells in situ allows for the treatment of multiple tissue and cell types.

[0918] In one embodiment, such as those where viral vector systems are used to generate viral particles to deliver the composition and/or component thereof to a cell, the total cargo size of the composition and/or component thereof should be considered as vector systems can have limits on the size of a polynucleotide that can be expressed therefrom and/or packaged into cargo inside of a viral particle. In one embodiment, the tropism of a vector system, such as a viral vector system, should be considered as it can impact the cell type to which the composition or component thereof can be efficiently and/or effectively delivered.

[0919] When delivering a system or component thereof via a viral-based system, it can be important to consider the amount of viral particles that will be needed to achieve a therapeutic effect so as to account for the potential immune response that can be elicited by the viral particles when delivered to a subject or cell(s). When delivering a system or component thereof via a viral based system, it can be important to consider mechanisms of controlling the distribution and/or dosage of the system in vivo. Generally, to reduce the potential for off-target effects, it is optimal but not necessarily required, that the amount of the system be as close to the minimum or least effective dose. In practice this can be challenging to do.

[0920] In one embodiment, it can be important to consider the immunogenicity of the system or component thereof. In embodiments, where the immunogenicity of the system or component thereof is of concern, the immunogenicity system or component thereof can be reduced. By way of example only, the immunogenicity of the system or component thereof can be reduced using the approach set out in Tangri et al. Accordingly, directed evolution or rational design may be used to reduce the immunogenicity of the IscB polypeptide nuclease in the host species (human or other species).

### Xenotransplantation

[0921] The present invention also contemplates use of the composition described herein, e.g. IscB polypeptide nuclease protein systems, to provide RNA-guided DNA nucleases adapted to be used to provide modified tissues for transplantation. For example, RNA-guided DNA nucleases may be used to knockout, knockdown or disrupt selected genes in an animal, such as a transgenic pig (such as the human heme oxygenase-1 transgenic pig line), for example by disrupting expression of genes that encode epitopes recognized by the human immune system, i.e. xenoantigen genes. Candidate porcine genes for disruption may for example include α(1,3)-galactosyltransferase and cytidine monophosphate-N-acetylneuraminic acid hydroxylase genes (see PCT Patent Publication WO 2014/066505). In addition, genes encoding endogenous retroviruses may be disrupted, for example the genes encoding all porcine endogenous retroviruses (see Yang et al., 2015, Genome-wide inactivation of porcine endogenous retroviruses (PERVs), Science 27 Nov. 2015: Vol. 350 no. 6264 pp. 1101-1104). In addition, RNA-guided DNA nucleases may be used to target a site for integration of additional genes in xenotransplant donor animals, such as a human CD55 gene to improve protection against hyperacute rejection.

[0922] Embodiments of the invention also relate to methods and compositions related to knocking out genes, amplifying genes and repairing particular mutations associated with DNA repeat instability and neurological disorders (Robert D. Wells, Tetsuo Ashizawa, Genetic Instabilities and Neurological Diseases, Second Edition, Academic Press, Oct. 13, 2011—Medical). Specific aspects of tandem repeat sequences have been found to be responsible for more than twenty human diseases (New insights into repeat instability: role of RNA·DNA hybrids. McIvor E I, Polak U, Napierala M. RNA Biol. 2010 September-October; 7(5):551-8). The present effector protein systems may be harnessed to correct these defects of genomic instability.

[0923] Several further aspects of the invention relate to correcting defects associated with a wide range of genetic diseases which are further described on the website of the National Institutes of Health under the topic subsection Genetic Disorders (website at health.nih.gov/topic/GeneticDisorders). The genetic brain diseases may include but are not limited to Adrenoleukodystrophy, Agenesis of the Corpus Callosum, Aicardi Syndrome, Alpers' Disease, Alzheimer's Disease, Barth Syndrome, Batten Disease, CADASIL, Cerebellar Degeneration, Fabry's Disease, Gerstmann-Straussler-Scheinker Disease, Huntington's Disease and other Triplet Repeat Disorders, Leigh's Disease, Lesch-Nyhan Syndrome, Menkes Disease, Mitochondrial Myopathies and NINDS Colpocephaly. These diseases are further described on the website of the National Institutes of Health under the subsection Genetic Brain Disorders.

### Applications in Plants and Fungi

[0924] The compositions, systems, and methods described herein can be used to perform gene or genome interrogation or editing or manipulation in plants and fungi. For example, the applications include investigation and/or selection and/or interrogations and/or comparison and/or manipulations and/or transformation of plant genes or genomes; e.g., to create, identify, develop, optimize, or confer trait(s) or characteristic(s) to plant(s) or to transform a plant or fugus genome. There can accordingly be improved production of plants, new plants with new combinations of traits or characteristics or new plants with enhanced traits. The compositions, systems, and methods can be used with regard to plants in Site-Directed Integration (SDI) or Gene Editing (GE) or any Near Reverse Breeding (NRB) or Reverse Breeding (RB) techniques.

[0925] The compositions, systems, and methods herein may be used to confer desired traits (e.g., enhanced nutritional quality, increased resistance to diseases and resistance to biotic and abiotic stress, and increased production of commercially valuable plant products or heterologous compounds) on essentially any plants and fungi, and their cells and tissues. The compositions, systems, and methods may be used to modify endogenous genes or to modify their expression without the permanent introduction into the genome of any foreign gene.

[0926] In one embodiment, compositions, systems, and methods may be used in genome editing in plants or where RNAi or similar genome editing techniques have been used previously; see, e.g., Nekrasov, “Plant genome editing made easy: targeted mutagenesis in model and crop plants using the CRISPR-Cas system,” Plant Methods 2013, 9:39 (doi:10.1186/1746-4811-9-39); Brooks, “Efficient gene editing in tomato in the first generation using the CRISPR-Cas9 system,” Plant Physiology September 2014 pp 114.247577; Shan, “Targeted genome modification of crop plants using a CRISPR-Cas system,” Nature Biotechnology 31, 686-688 (2013); Feng, “Efficient genome editing in plants using a CRISPR/Cas system,” Cell Research (2013) 23:1229-1232. doi:10.1038/cr.2013.114; published online 20 Aug. 2013; Xie, “RNA-guided genome editing in plants using a CRISPR-Cas system,” Mol Plant. 2013 November; 6(6):1975-83. doi: 10.1093/mp/sst119. Epub 2013 Aug. 17; Xu, “Gene targeting using the Agrobacterium tumefaciens-mediated CRISPR-Cas system in rice,” Rice 2014, 7:5 (2014), Zhou et al., “Exploiting SNPs for biallelic CRISPR mutations in the outcrossing woody perennial Populus reveals 4-coumarate: CoA ligase specificity and Redundancy,” New Phytologist (2015) (Forum) 1-4 (available online only at www.newphytologist.com); Caliando et al, “Targeted DNA degradation using a CRISPR device stably carried in the host genome, NATURE COMMUNICATIONS 6:6989, DOI: 10.1038/ncomms7989, www.nature.com/naturecommunications DOI: 10.1038/ncomms7989; U.S. Pat. No. 6,603,061—Agrobacterium-Mediated Plant Transformation Method; U.S. Pat. No. 7,868,149—Plant Genome Sequences and Uses Thereof and US 2009/0100536—Transgenic Plants with Enhanced Agronomic Traits, Morrell et al “Crop genomics: advances and applications,” Nat Rev Genet. 2011 Dec. 29; 13(2):85-96, all the contents and disclosure of each of which are herein incorporated by reference in their entirety. Aspects of utilizing the compositions, systems, and methods may be analogous to the use of the composition in plants, and mention is made of the University of Arizona website “CRISPR-PLANT” (genome.arizona.edu/crispr/) (supported by Penn State and AGI).

[0927] The compositions, systems, and methods may also be used on protoplasts. A “protoplast” refers to a plant cell that has had its protective cell wall completely or partially removed using, for example, mechanical or enzymatic means resulting in an intact biochemical competent unit of living plant that can reform their cell wall, proliferate and regenerate grow into a whole plant under proper growing conditions.

[0928] The compositions, systems, and methods may be used for screening genes (e.g., endogenous, mutations) of interest. In some examples, genes of interest include those encoding enzymes involved in the production of a component of added nutritional value or generally genes affecting agronomic traits of interest, across species, phyla, and plant kingdom. By selectively targeting e.g. genes encoding enzymes of metabolic pathways, the genes responsible for certain nutritional aspects of a plant can be identified. Similarly, by selectively targeting genes which may affect a desirable agronomic trait, the relevant genes can be identified. Accordingly, the present invention encompasses screening methods for genes encoding enzymes involved in the production of compounds with a particular nutritional value and/or agronomic traits.

[0929] It is also understood that reference herein to animal cells may also apply, mutatis mutandis, to plant or fungal cells unless otherwise apparent; and, the enzymes herein having reduced off-target effects and systems employing such enzymes can be used in plant applications, including those mentioned herein.

[0930] In some cases, nucleic acids introduced to plants and fungi may be codon optimized for expression in the plants and fungi. Methods of codon optimization include those described in Kwon K C, et al., Codon Optimization to Enhance Expression Yields Insights into Chloroplast Translation, Plant Physiol. 2016 September; 172(1):62-77.

[0931] The components (e.g., IscB polypeptide nuclease) in the compositions and systems may further comprise one or more functional domains described herein. In some examples, the functional domains may be an exonuclease. Such exonuclease may increase the efficiency of the IscB polypeptide nuclease’ function, e.g., mutagenesis efficiency. An example of the functional domain is Trex2, as described in Weiss T et al., www.biorxiv.org/content/10.1101/2020.04.11.037572v1, doi: doi.org/10.1101/2020.04.11.037572.

### Examples of Plants

[0932] The compositions, systems, and methods herein can be used to confer desired traits on essentially any plant. A wide variety of plants and plant cell systems may be engineered for the desired physiological and agronomic characteristics. In general, the term “plant” relates to any various photosynthetic, eukaryotic, unicellular or multicellular organism of the kingdom Plantae characteristically growing by cell division, containing chloroplasts, and having cell walls comprised of cellulose. The term plant encompasses monocotyledonous and dicotyledonous plants.

[0933] The compositions, systems, and methods may be used over a broad range of plants, such as for example with dicotyledonous plants belonging to the orders Magniolales, Illiciales, Laurales, Piperales, Aristochiales, Nymphaeales, Ranunculales, Papeverales, Sarraceniaceae, Trochodendrales, Hamamelidales, Eucomiales, Leitneriales, Myricales, Fagales, Casuarinales, Caryophyllales, Batales, Polygonales, Plumbaginales, Dilleniales, Theales, Malvales, Urticales, Lecythidales, Violales, Salicales, Capparales, Ericales, Diapensales, Ebenales, Primulales, Rosales, Fabales, Podostemales, Haloragales, Myrtales, Cornales, Proteales, San tales, Rafflesiales, Celastrales, Euphorbiales, Rhamnales, Sapindales, Juglandales, Geraniales, Polygalales, Umbellales, Gentianales, Polemoniales, Lamiales, Plantaginales, Scrophulariales, Campanulales, Rubiales, Dipsacales, and Asterales; monocotyledonous plants such as those belonging to the orders Alismatales, Hydrocharitales, Najadales, Triuridales, Commelinales, Eriocaulales, Restionales, Poales, Juncales, Cyperales, Typhales, Bromeliales, Zingiberales, Arecales, Cyclanthales, Pandanales, Arales, Lilliales, and Orchid ales, or with plants belonging to Gymnospermae, e.g., those belonging to the orders Pinales, Ginkgoales, Cycadales, Araucariales, Cupressales and Gnetales.

[0934] The compositions, systems, and methods herein can be used over a broad range of plant species, included in the non-limitative list of dicot, monocot or gymnosperm genera hereunder: Atropa, Alseodaphne, Anacardium, Arachis, Beilschmiedia, Brassica, Carthamus, Cocculus, Croton, Cucumis, Citrus, Citrullus, Capsicum, Catharanthus, Cocos, Coffea, Cucurbita, Daucus, Duguetia, Eschscholzia, Ficus, Fragaria, Glaucium, Glycine, Gossypium, Helianthus, Hevea, Hyoscyamus, Lactuca, Landolphia, Linum, Litsea, Lycopersicon, Lupinus, Manihot, Majorana, Malus, Medicago, Nicotiana, Olea, Parthenium, Papaver, Persea, Phaseolus, Pistacia, Pisum, Pyrus, Prunus, Raphanus, Ricinus, Senecio, Sinomenium, Stephania, Sinapis, Solanum, Theobroma, Trifolium, Trigonella, Vicia, Vinca, Vilis, and Vigna; and the genera Allium, Andropogon, Aragrostis, Asparagus, Avena, Cynodon, Elaeis, Festuca, Festulolium, Heterocallis, Hordeum, Lemna, Lolium, Musa, Oryza, Panicum, Pannesetum, Phleum, Poa, Secale, Sorghum, Triticum, Zea, Abies, Cunninghamia, Ephedra, Picea, Pinus, and Pseudotsuga.

[0935] In one embodiment, target plants and plant cells for engineering include those monocotyledonous and dicotyledonous plants, such as crops including grain crops (e.g., wheat, maize, rice, millet, barley), fruit crops (e.g., tomato, apple, pear, strawberry, orange), forage crops (e.g., alfalfa), root vegetable crops (e.g., carrot, potato, sugar beets, yam), leafy vegetable crops (e.g., lettuce, spinach); flowering plants (e.g., petunia, rose, chrysanthemum), conifers and pine trees (e.g., pine fir, spruce); plants used in phytoremediation (e.g., heavy metal accumulating plants); oil crops (e.g., sunflower, rape seed) and plants used for experimental purposes (e.g., Arabidopsis). Specifically, the plants are intended to comprise without limitation angiosperm and gymnosperm plants such as acacia, alfalfa, amaranth, apple, apricot, artichoke, ash tree, asparagus, avocado, banana, barley, beans, beet, birch, beech, blackberry, blueberry, broccoli, Brussel's sprouts, cabbage, canola, cantaloupe, carrot, cassava, cauliflower, cedar, a cereal, celery, chestnut, cherry, Chinese cabbage, citrus, clementine, clover, coffee, corn, cotton, cowpea, cucumber, cypress, eggplant, elm, endive, eucalyptus, fennel, figs, fir, geranium, grape, grapefruit, groundnuts, ground cherry, gum hemlock, hickory, kale, kiwifruit, kohlrabi, larch, lettuce, leek, lemon, lime, locust, pine, maidenhair, maize, mango, maple, melon, millet, mushroom, mustard, nuts, oak, oats, oil palm, okra, onion, orange, an ornamental plant or flower or tree, papaya, palm, parsley, parsnip, pea, peach, peanut, pear, peat, pepper, persimmon, pigeon pea, pine, pineapple, plantain, plum, pomegranate, potato, pumpkin, radicchio, radish, rapeseed, raspberry, rice, rye, sorghum, safflower, sallow, soybean, spinach, spruce, squash, strawberry, sugar beet, sugarcane, sunflower, sweet potato, sweet corn, tangerine, tea, tobacco, tomato, trees, triticale, turf grasses, turnips, vine, walnut, watercress, watermelon, wheat, yams, yew, and zucchini.

[0936] The term plant also encompasses Algae, which are mainly photoautotrophs unified primarily by their lack of roots, leaves and other organs that characterize higher plants. The compositions, systems, and methods can be used over a broad range of “algae” or “algae cells.” Examples of algae include eukaryotic phyla, including the Rhodophyta (red algae), Chlorophyta (green algae), Phaeophyta (brown algae), Bacillariophyta (diatoms), Eustigmatophyta and dinoflagellates as well as the prokaryotic phylum Cyanobacteria (blue-green algae). Examples of algae species include those of Amphora, Anabaena, Anikstrodesmis, Botryococcus, Chaetoceros, Chlamydomonas, Chlorella, Chlorococcum, Cyclotella, Cylindrotheca, Dunaliella, Emiliana, Euglena, Hematococcus, Isochrysis, Monochrysis, Monoraphidium, Nannochloris, Nannnochloropsis, Navicula, Nephrochloris, Nephroselmis, Nitzschia, Nodularia, Nostoc, Oochromonas, Oocystis, Oscillartoria, Pavlova, Phaeodactylum, Playtmonas, Pleurochrysis, Porhyra, Pseudoanabaena, Pyramimonas, Stichococcus, Synechococcus, Synechocystis, Tetraselmis, Thalassiosira, and Trichodesmium.

### Plant Promoters

[0937] In order to ensure appropriate expression in a plant cell, the components of the components and systems herein may be placed under control of a plant promoter. A plant promoter is a promoter operable in plant cells. A plant promoter is capable of initiating transcription in plant cells, whether or not its origin is a plant cell. The use of different types of promoters is envisaged.

[0938] In some examples, the plant promoter is a constitutive plant promoter, which is a promoter that is able to express the open reading frame (ORF) that it controls in all or nearly all of the plant tissues during all or nearly all developmental stages of the plant (referred to as “constitutive expression”). One example of a constitutive promoter is the cauliflower mosaic virus 35S promoter. In some examples, the plant promoter is a regulated promoter, which directs gene expression not constitutively, but in a temporally- and/or spatially-regulated manner, and includes tissue-specific, tissue-preferred and inducible promoters. Different promoters may direct the expression of a gene in different tissues or cell types, or at different stages of development, or in response to different environmental conditions. In some examples, the plant promoter is a tissue-preferred promoters, which can be utilized to target enhanced expression in certain cell types within a particular plant tissue, for instance vascular cells in leaves or roots or in specific cells of the seed.

[0939] Exemplary plant promoters include those obtained from plants, plant viruses, and bacteria such as Agrobacterium or Rhizobium which comprise genes expressed in plant cells. Additional examples of promoters include those described in Kawamata et al., (1997) Plant Cell Physiol 38:792-803; Yamamoto et al., (1997) Plant J 12:255-65; Hire et al, (1992) Plant Mol Biol 20:207-18,Kuster et al, (1995) Plant Mol Biol 29:759-72, and Capana et al., (1994) Plant Mol Biol 25:681-91.

[0940] In some examples, a plant promoter may be an inducible promoter, which is inducible and allows for spatiotemporal control of gene editing or gene expression may use a form of energy. The form of energy may include sound energy, electromagnetic radiation, chemical energy and/or thermal energy. Examples of inducible systems include tetracycline inducible promoters (Tet-On or Tet-Off), small molecule two-hybrid transcription activations systems (FKBP, ABA, etc.), or light inducible systems (Phytochrome, LOV domains, or cryptochrome), such as a Light Inducible Transcriptional Effector (LITE) that direct changes in transcriptional activity in a sequence-specific manner. In a particular example, of the components of a light inducible system include a IscB polypeptide nuclease, a light-responsive cytochrome heterodimer (e.g. from Arabidopsis thaliana), and a transcriptional activation/repression domain.

[0941] In some examples, the promoter may be a chemical-regulated promotor (where the application of an exogenous chemical induces gene expression) or a chemical-repressible promoter (where application of the chemical represses gene expression). Examples of chemical-inducible promoters include maize ln2-2 promoter (activated by benzene sulfonamide herbicide safeners), the maize GST promoter (activated by hydrophobic electrophilic compounds used as pre-emergent herbicides), the tobacco PR-1 a promoter (activated by salicylic acid), promoters regulated by antibiotics (such as tetracycline-inducible and tetracycline-repressible promoters).

### Stable Integration in the Genome of Plants

[0942] In one embodiment, polynucleotides encoding the components of the compositions and systems may be introduced for stable integration into the genome of a plant cell. In some cases, vectors or expression systems may be used for such integration. The design of the vector or the expression system can be adjusted depending on for when, where and under what conditions the guide RNA and/or the IscB polypeptide or CRISPR-associated IscB polypeptide nuclease gene are expressed. In some cases, the polynucleotides may be integrated into an organelle of a plant, such as a plastid, mitochondrion or a chloroplast. The elements of the expression system may be on one or more expression constructs which are either circular such as a plasmid or transformation vector, or non-circular such as linear double stranded DNA.

[0943] In one embodiment, the method of integration generally comprises the steps of selecting a suitable host cell or host tissue, introducing the construct(s) into the host cell or host tissue, and regenerating plant cells or plants therefrom. In some examples, the expression system for stable integration into the genome of a plant cell may contain one or more of the following elements: a promoter element that can be used to express the RNA and/or IscB polypeptide nuclease in a plant cell; a 5′ untranslated region to enhance expression; an intron element to further enhance expression in certain cells, such as monocot cells; a multiple-cloning site to provide convenient restriction sites for inserting the guide RNA and/or the IscB polypeptide nuclease gene sequences and other desired elements; and a 3′ untranslated region to provide for efficient termination of the expressed transcript.

### Transient Expression in Plants

[0944] In one embodiment, the components of the compositions and systems may be transiently expressed in the plant cell. In some examples, the compositions and systems may modify a target nucleic acid only when both the guide RNA and the IscB polypeptide or CRISPR-associated IscB polypeptide or CRISPR-associated IscB polypeptide nuclease are present in a cell, such that genomic modification can further be controlled. As the expression of the IscB polypeptide or CRISPR-associated IscB polypeptide nuclease is transient, plants regenerated from such plant cells typically contain no foreign DNA. In certain examples, the IscB polypeptide or CRISPR-associated IscB polypeptide is stably expressed and the guide sequence is transiently expressed.

[0945] DNA and/or RNA (e.g., mRNA) may be introduced to plant cells for transient expression. In such cases, the introduced nucleic acid may be provided in sufficient quantity to modify the cell but do not persist after a contemplated period of time has passed or after one or more cell divisions.

[0946] The transient expression may be achieved using suitable vectors. Exemplary vectors that may be used for transient expression include a pEAQ vector (may be tailored for Agrobacterium-mediated transient expression) and Cabbage Leaf Curl virus (CaLCuV), and vectors described in Sainsbury F. et al., Plant Biotechnol J. 2009 September; 7(7):682-93; and Yin K et al., Scientific Reports volume 5, Article number: 14926 (2015).

[0947] Combinations of the different methods described above are also envisaged.

Translocation to and/or Expression in Specific Plant Organelles

[0948] The compositions and systems herein may comprise elements for translocation to and/or expression in a specific plant organelle.

### Chloroplast Targeting

[0949] In one embodiment, it is envisaged that the compositions and systems are used to specifically modify chloroplast genes or to ensure expression in the chloroplast. The compositions and systems (e.g., IscB polypeptide or CRISPR-associated IscB polypeptide nuclease, ωRNAs, or their encoding polynucleotides) may be transformed, compartmentalized, and/or targeted to the chloroplast. In an example, the introduction of genetic modifications in the plastid genome can reduce biosafety issues such as gene flow through pollen.

[0950] Examples of methods of chloroplast transformation include Particle bombardment, PEG treatment, and microinjection, and the translocation of transformation cassettes from the nuclear genome to the plastid. In some examples, targeting of chloroplasts may be achieved by incorporating in chloroplast localization sequence, and/or the expression construct a sequence encoding a chloroplast transit peptide (CTP) or plastid transit peptide, operably linked to the 5′ region of the sequence encoding the components of the compositions and systems. Additional examples of transforming, targeting and localization of chloroplasts include those described in WO2010061186, Protein Transport into Chloroplasts, 2010, Annual Review of Plant Biology, Vol. 61: 157-180, and US 20040142476, which are incorporated by reference herein in their entireties.

### Exemplary Applications in Plants

[0951] The compositions, systems, and methods may be used to generate genetic variation(s) in a plant (e.g., crop) of interest. One or more, e.g., a library of, ωRNAs targeting one or more locations in a genome may be provided and introduced into plant cells together with the IscB polypeptide nuclease. For example, a collection of genome-scale point mutations and gene knock-outs can be generated. In some examples, the compositions, systems, and methods may be used to generate a plant part or plant from the cells so obtained and screening the cells for a trait of interest. The target genes may include both coding and non-coding regions. In some cases, the trait is stress tolerance and the method is a method for the generation of stress-tolerant crop varieties.

[0952] In one embodiment, the compositions, systems, and methods are used to modify endogenous genes or to modify their expression. The expression of the components may induce targeted modification of the genome, either by direct activity of the IscB polypeptide or CRISPR-associated IscB polypeptide nuclease and optionally introduction of recombination template DNA, or by modification of genes targeted. The different strategies described herein above allow IscB polypeptide or CRISPR-associated IscB polypeptide nuclease-mediated targeted genome editing without requiring the introduction of the components into the plant genome.

[0953] In some cases, the modification may be performed without the permanent introduction into the genome of the plant of any foreign gene, including those encoding components of the composition herein, so as to avoid the presence of foreign DNA in the genome of the plant. This can be of interest as the regulatory requirements for non-transgenic plants are less rigorous. Components which are transiently introduced into the plant cell are typically removed upon crossing.

[0954] For example, the modification may be performed by transient expression of the components of the compositions and systems. The transient expression may be performed by delivering the components of the compositions and systems with viral vectors, delivery into protoplasts, with the aid of particulate molecules such as nanoparticles or CPPs.

Generation of Plants with Desired Traits

[0955] The compositions, systems, and methods herein may be used to introduce desired traits to plants. The approaches include introduction of one or more foreign genes to confer a trait of interest, editing or modulating endogenous genes to confer a trait of interest.

### Agronomic Traits

[0956] In one embodiment, crop plants can be improved by influencing specific plant traits. Examples of the traits include improved agronomic traits such as herbicide resistance, disease resistance, abiotic stress tolerance, high yield, and superior quality, pesticide-resistance, disease resistance, insect and nematode resistance, resistance against parasitic weeds, drought tolerance, nutritional value, stress tolerance, self-pollination voidance, forage digestibility biomass, and grain yield.

[0957] In one embodiment, genes that confer resistance to pests or diseases may be introduced to plants. In cases there are endogenous genes that confer such resistance in a plants, their expression and function may be enhanced (e.g., by introducing extra copies, modifications that enhance expression and/or activity).

[0958] Examples of genes that confer resistance include plant disease resistance genes (e.g., Cf-9, Pto, RSP2, SlDMR6-1), genes conferring resistance to a pest (e.g., those described in WO96/30517), Bacillus thuringiensis proteins, lectins, Vitamin-binding proteins (e.g., avidin), enzyme inhibitors (e.g., protease or proteinase inhibitors or amylase inhibitors), insect-specific hormones or pheromones (e.g., ecdysteroid or a juvenile hormone, variant thereof, a mimetic based thereon, or an antagonist or agonist thereof) or genes involved in the production and regulation of such hormone and pheromones, insect-specific peptides or neuropeptide, Insect-specific venom (e.g., produced by a snake, a wasp, etc., or analog thereof), Enzymes responsible for a hyperaccumulation of a monoterpene, a sesquiterpene, a steroid, hydroxamic acid, a phenylpropanoid derivative or another nonprotein molecule with insecticidal activity, Enzymes involved in the modification of biologically active molecule (e.g., a glycolytic enzyme, a proteolytic enzyme, a lipolytic enzyme, a nuclease, a cyclase, a transaminase, an esterase, a hydrolase, a phosphatase, a kinase, a phosphorylase, a polymerase, an elastase, a chitinase and a glucanase, whether natural or synthetic), molecules that stimulates signal transduction, Viral-invasive proteins or a complex toxin derived therefrom, Developmental-arrestive proteins produced in nature by a pathogen or a parasite, a developmental-arrestive protein produced in nature by a plant, or any combination thereof.

[0959] The compositions, systems, and methods may be used to identify, screen, introduce or remove mutations or sequences lead to genetic variability that give rise to susceptibility to certain pathogens, e.g., host specific pathogens. Such approach may generate plants that are non-host resistance, e.g., the host and pathogen are incompatible or there can be partial resistance against all races of a pathogen, typically controlled by many genes and/or also complete resistance to some races of a pathogen but not to other races.

[0960] In one embodiment, the compositions, systems, and methods may be used to modify genes involved in plant diseases. Such genes may be removed, inactivated, or otherwise regulated or modified. Examples of plant diseases include those described in [0045]-[0080] of US20140213619A1, which is incorporated by reference herein in its entirety.

[0961] In one embodiment, genes that confer resistance to herbicides may be introduced to plants. Examples of genes that confer resistance to herbicides include genes conferring resistance to herbicides that inhibit the growing point or meristem, such as an imidazolinone or a sulfonylurea, genes conferring glyphosate tolerance (e.g., resistance conferred by, e.g., mutant 5-enolpyruvylshikimate-3-phosphate synthase genes, aroA genes and glyphosate acetyl transferase (GAT) genes, respectively), or resistance to other phosphono compounds such as by glufosinate (phosphinothricin acetyl transferase (PAT) genes from Streptomyces species, including Streptomyces hygroscopicus and Streptomyces viridichromogenes), and to pyridinoxy or phenoxy proprionic acids and cyclohexones by ACCase inhibitor-encoding genes), genes conferring resistance to herbicides that inhibit photosynthesis (such as a triazine (psbA and gs+ genes) or a benzonitrile (nitrilase gene), and glutathione S-transferase), genes encoding enzymes detoxifying the herbicide or a mutant glutamine synthase enzyme that is resistant to inhibition, genes encoding a detoxifying enzyme is an enzyme encoding a phosphinothricin acetyltransferase (such as the bar or pat protein from Streptomyces species), genes encoding hydroxyphenylpyruvatedioxygenases (HPPD) inhibitors, e.g., naturally occurring HPPD resistant enzymes, and genes encoding a mutated or chimeric HPPD enzyme.

[0962] In one embodiment, genes involved in Abiotic stress tolerance may be introduced to plants. Examples of genes include those capable of reducing the expression and/or the activity of poly(ADP-ribose) polymerase (PARP) gene, transgenes capable of reducing the expression and/or the activity of the PARG encoding genes, genes coding for a plant-functional enzyme of the nicotineamide adenine dinucleotide salvage synthesis pathway including nicotinamidase, nicotinate phosphoribosyltransferase, nicotinic acid mononucleotide adenyl transferase, nicotinamide adenine dinucleotide synthetase or nicotine amide phosphorybosyltransferase, enzymes involved in carbohydrate biosynthesis, enzymes involved in the production of polyfructose (e.g., the inulin and levan-type), the production of alpha-1,6 branched alpha-1,4-glucans, the production of alternan, the production of hyaluronan.

[0963] In one embodiment, genes that improve drought resistance may be introduced to plants. Examples of genes Ubiquitin Protein Ligase protein (UPL) protein (UPL3), DR02, DR03, ABC transporter, and DREB1A.

### Nutritionally Improved Plants

[0964] In one embodiment, the compositions, systems, and methods may be used to produce nutritionally improved plants. In some examples, such plants may provide functional foods, e.g., a modified food or food ingredient that may provide a health benefit beyond the traditional nutrients it contains. In certain examples, such plants may provide nutraceuticals foods, e.g., substances that may be considered a food or part of a food and provides health benefits, including the prevention and treatment of disease. The nutraceutical foods may be useful in the prevention and/or treatment of diseases in animals and humans, e.g., cancers, diabetes, cardiovascular disease, and hypertension.

[0965] An improved plant may naturally produce one or more desired compounds and the modification may enhance the level or activity or quality of the compounds. In some cases, the improved plant may not naturally produce the compound(s), while the modification enables the plant to produce such compound(s). In some cases, the compositions, systems, and methods used to modify the endogenous synthesis of these compounds indirectly, e.g. by modifying one or more transcription factors that controls the metabolism of this compound.

[0966] Examples of nutritionally improved plants include plants comprising modified protein quality, content and/or amino acid composition, essential amino acid contents, oils and fatty acids, carbohydrates, vitamins and carotenoids, functional secondary metabolites, and minerals. In some examples, the improved plants may comprise or produce compounds with health benefits. Examples of nutritionally improved plants include those described in Newell-McGloughlin, Plant Physiology, July 2008, Vol. 147, pp. 939-953.

[0967] Examples of compounds that can be produced include carotenoids (e.g., α-Carotene or β-Carotene), lutein, lycopene, Zeaxanthin, Dietary fiber (e.g., insoluble fibers, β-Glucan, soluble fibers, fatty acids (e.g., ω-3 fatty acids, Conjugated linoleic acid, GLA,), Flavonoids (e.g., Hydroxycinnamates, flavonols, catechins and tannins), Glucosinolates, indoles, isothiocyanates (e.g., Sulforaphane), Phenolics (e.g., stilbenes, caffeic acid and ferulic acid, epicatechin), Plant stanols/sterols, Fructans, inulins, fructo-oligosaccharides, Saponins, Soybean proteins, Phytoestrogens (e.g., isoflavones, lignans), Sulfides and thiols such as diallyl sulphide, Allyl methyl trisulfide, dithiolthiones, Tannins, such as proanthocyanidins, or any combination thereof.

[0968] The compositions, systems, and methods may also be used to modify protein/starch functionality, shelf life, taste/aesthetics, fiber quality, and allergen, antinutrient, and toxin reduction traits.

[0969] Examples of genes and nucleic acids that can be modified to introduce the traits include stearyl-ACP desaturase, DNA associated with the single allele which may be responsible for maize mutants characterized by low levels of phytic acid, Tf RAP2.2 and its interacting partner SINAT2, Tf Dof1, and DOF Tf AtDof1.1 (OBP2).

### Modification of Polyploid Plants

[0970] The compositions, systems, and methods may be used to modify polyploid plants. Polyploid plants carry duplicate copies of their genomes (e.g. as many as six, such as in wheat). In some cases, the compositions, systems, and methods may be/can be multiplexed to affect all copies of a gene, or to target dozens of genes at once. For instance, the compositions, systems, and methods may be used to simultaneously ensure a loss of function mutation in different genes responsible for suppressing defenses against a disease. The modification may be simultaneous suppression the expression of the TaMLO-Al, TaMLO-Bl and TaMLO-Dl nucleic acid sequence in a wheat plant cell and regenerating a wheat plant therefrom, in order to ensure that the wheat plant is resistant to powdery mildew (e.g., as described in WO2015109752).

### Regulation of Fruit-Ripening

[0971] The compositions, systems, and methods may be used to regulate ripening of fruits. Ripening is a normal phase in the maturation process of fruits and vegetables. Only a few days after it starts it may render a fruit or vegetable inedible, which can bring significant losses to both farmers and consumers.

[0972] In one embodiment, the compositions, systems, and methods are used to reduce ethylene production. In some examples, the compositions, systems, and methods may be used to suppress the expression and/or activity of ACC synthase, insert a ACC deaminase gene or a functional fragment thereof, insert a SAM hydrolase gene or functional fragment thereof, suppress ACC oxidase gene expression

[0973] Alternatively or additionally, the compositions, systems, and methods may be used to modify ethylene receptors (e.g., suppressing ETR1) and/or Polygalacturonase (PG). Suppression of a gene may be achieved by introducing a mutation, an antisense sequence, and/or a truncated copy of the gene to the genome.

### Increasing Storage Life of Plants

[0974] In one embodiment, the compositions, systems, and methods are used to modify genes involved in the production of compounds which affect storage life of the plant or plant part. The modification may be in a gene that prevents the accumulation of reducing sugars in potato tubers. Upon high-temperature processing, these reducing sugars react with free amino acids, resulting in brown, bitter-tasting products and elevated levels of acrylamide, which is a potential carcinogen. In one embodiment, the methods provided herein are used to reduce or inhibit expression of the vacuolar invertase gene (VInv), which encodes a protein that breaks down sucrose to glucose and fructose.

### Reducing Allergens in Plants

[0975] In one embodiment, the compositions, systems, and methods are used to generate plants with a reduced level of allergens, making them safer for consumers. To this end, the compositions, systems, and methods may be used to identify and modify (e.g., suppress) one or more genes responsible for the production of plant allergens. Examples of such genes include Lol p5, as well as those in peanuts, soybeans, lentils, peas, lupin, green beans, mung beans, such as those described in Nicolaou et al., Current Opinion in Allergy and Clinical Immunology 2011; 11(3):222), which is incorporated by reference herein in its entirety.

### Generation of Male Sterile Plants

[0976] The compositions, systems, and methods may be used to generate male sterile plants. Hybrid plants typically have advantageous agronomic traits compared to inbred plants. However, for self-pollinating plants, the generation of hybrids can be challenging. In different plant types (e.g., maize and rice), genes have been identified which are important for plant fertility, more particularly male fertility. Plants that are as such genetically altered can be used in hybrid breeding programs.

[0977] The compositions, systems, and methods may be used to modify genes involved male fertility, e.g., inactivating (such as by introducing mutations to) genes required for male fertility. Examples of the genes involved in male fertility include cytochrome P450-like gene (MS26) or the meganuclease gene (MS45), and those described in Wan X et al., Mol Plant. 2019 Mar. 4; 12(3):321-342; and Kim Y J, et al., Trends Plant Sci. 2018 January; 23(1):53-65.

### Increasing the Fertility Stage in Plants

[0978] In one embodiment, the compositions, systems, and methods may be used to prolong the fertility stage of a plant such as of a rice. For instance, a rice fertility stage gene such as Ehd3 can be targeted in order to generate a mutation in the gene and plantlets can be selected for a prolonged regeneration plant fertility stage.

### Production of Early Yield of Products

[0979] In one embodiment, the compositions, systems, and methods may be used to produce early yield of the product. For example, flowering process may be modulated, e.g., by mutating flowering repressor gene such as SP5G. Examples of such approaches include those described in Soyk S, et al., Nat Genet. 2017 January; 49(1):162-168.

### Oil and Biofuel Production

[0980] The compositions, systems, and methods may be used to generate plants for oil and biofuel production. Biofuels include fuels made from plant and plant-derived resources. Biofuels may be extracted from organic matter whose energy has been obtained through a process of carbon fixation or are made through the use or conversion of biomass. This biomass can be used directly for biofuels or can be converted to convenient energy containing substances by thermal conversion, chemical conversion, and biochemical conversion. This biomass conversion can result in fuel in solid, liquid, or gas form. Biofuels include bioethanol and biodiesel. Bioethanol can be produced by the sugar fermentation process of cellulose (starch), which may be derived from maize and sugar cane. Biodiesel can be produced from oil crops such as rapeseed, palm, and soybean. Biofuels can be used for transportation.

### Generation of Plants for Production of Vegetable Oils and Biofuels

[0981] The compositions, systems, and methods may be used to generate algae (e.g., diatom) and other plants (e.g., grapes) that express or overexpress high levels of oil or biofuels.

[0982] In some cases, the compositions, systems, and methods may be used to modify genes involved in the modification of the quantity of lipids and/or the quality of the lipids. Examples of such genes include those involved in the pathways of fatty acid synthesis, e.g., acetyl-CoA carboxylase, fatty acid synthase, 3-ketoacyl_acyl-carrier protein synthase III, glycerol-3-phospate deshydrogenase (G3PDH), Enoyl-acyl carrier protein reductase (Enoyl-ACP-reductase), glycerol-3-phosphate acyltransferase, lysophosphatidic acyl transferase or diacylglycerol acyltransferase, phospholipid:diacylglycerol acyltransferase, phoshatidate phosphatase, fatty acid thioesterase such as palmitoyi protein thioesterase, or malic enzyme activities.

[0983] In further embodiments, it is envisaged to generate diatoms that have increased lipid accumulation. This can be achieved by targeting genes that decrease lipid catabolization. Examples of genes include those involved in the activation of triacylglycerol and free fatty acids, β-oxidation of fatty acids, such as genes of acyl-CoA synthetase, 3-ketoacyl-CoA thiolase, acyl-CoA oxidase activity and phosphoglucomutase.

[0984] In some examples, algae may be modified for production of oil and biofuels, including fatty acids (e.g., fatty esters such as acid methyl esters (FAME) and fatty acid ethyl esters (FAEE)). Examples of methods of modifying microalgae include those described in Stovicek et al. Metab. Eng. Comm., 2015; 2:1; U.S. Pat. No. 8,945,839; and International Patent Publication No. WO 2015/086795.

[0985] In some examples, one or more genes may be introduced (e.g., overexpressed) to the plants (e.g., algae) to produce oils and biofuels (e.g., fatty acids) from a carbon source (e.g., alcohol). Examples of the genes include genes encoding acyl-CoA synthases, ester synthases, thioesterases (e.g., tesA, 'tesA, tesB, fatB, fatB2, fatB3, fatAl, or fatA), acyl-CoA synthases (e.g., fadD, JadK, BH3103, pfl-4354, EAV15023, fadDl, fadD2, RPC_4074,fadDD35, fadDD22, faa39), ester synthases (e.g., synthase/acyl-CoA:diacylglycerl acyltransferase from Simmondsia chinensis, Acinetobacter sp. ADP, Alcanivorax borkumensis, Pseudomonas aeruginosa, Fundibacter jadensis, Arabidopsis thaliana, or Alkaligenes eutrophus, or variants thereof).

[0986] Additionally or alternatively, one or more genes in the plants (e.g., algae) may be inactivated (e.g., expression of the genes is decreased). For examples, one or more mutations may be introduced to the genes. Examples of such genes include genes encoding acyl-CoA dehydrogenases (e.g., fade), outer membrane protein receptors, and transcriptional regulator (e.g., repressor) of fatty acid biosynthesis (e.g., fabR), pyruvate formate lyases (e.g., pflB), lactate dehydrogenases (e.g., IdhA).

### Organic Acid Production

[0987] In one embodiment, plants may be modified to produce organic acids such as lactic acid. The plants may produce organic acids using sugars, pentose or hexose sugars. To this end, one or more genes may be introduced (e.g., and overexpressed) in the plants. An example of such genes include LDH gene.

[0988] In some examples, one or more genes may be inactivated (e.g., expression of the genes is decreased). For examples, one or more mutations may be introduced to the genes. The genes may include those encoding proteins involved an endogenous metabolic pathway which produces a metabolite other than the organic acid of interest and/or wherein the endogenous metabolic pathway consumes the organic acid.

[0989] Examples of genes that can be modified or introduced include those encoding pyruvate decarboxylases (pdc), fumarate reductases, alcohol dehydrogenases (adh), acetaldehyde dehydrogenases, phosphoenolpyruvate carboxylases (ppc), D-lactate dehydrogenases (d-ldh), L-lactate dehydrogenases (1-ldh), lactate 2-monooxygenases, lactate dehydrogenase, cytochrome-dependent lactate dehydrogenases (e.g., cytochrome B2-dependent L-lactate dehydrogenases).

### Enhancing Plant Properties for Biofuel Production

[0990] In one embodiment, the compositions, systems, and methods are used to alter the properties of the cell wall of plants to facilitate access by key hydrolyzing agents for a more efficient release of sugars for fermentation. By reducing the proportion of lignin in a plant the proportion of cellulose can be increased. In one embodiment, lignin biosynthesis may be downregulated in the plant so as to increase fermentable carbohydrates.

[0991] In some examples, one or more lignin biosynthesis genes may be down regulated. Examples of such genes include 4-coumarate 3-hydroxylases (C3H), phenylalanine ammonia-lyases (PAL), cinnamate 4-hydroxylases (C4H), hydroxycinnamoyl transferases (HCT), caffeic acid O-methyltransferases (COMT), caffeoyl CoA 3-O-methyltransferases (CCoAOMT), ferulate 5-hydroxylases (F5H), cinnamyl alcohol dehydrogenases (CAD), cinnamoyl CoA-reductases (CCR), 4-coumarate-CoA ligases (4CL), monolignol-lignin-specific glycosyltransferases, and aldehyde dehydrogenases (ALDH), and those described in WO 2008064289.

[0992] In some examples, plant mass that produces lower level of acetic acid during fermentation may be reduced. To this end, genes involved in polysaccharide acetylation (e.g., Cas1L and those described in WO 2010096488) may be inactivated.

### Other Microorganisms for Oils and Biofuel Production

[0993] In one embodiment, microorganisms other than plants may be used for production of oils and biofuels using the compositions, systems, and methods herein. Examples of the microorganisms include those of the genus of Escherichia, Bacillus, Lactobacillus, Rhodococcus, Synechococcus, Synechoystis, Pseudomonas, Aspergillus, Trichoderma, Neurospora, Fusarium, Humicola, Rhizomucor, Kluyveromyces, Pichia, Mucor, Myceliophtora, Penicillium, Phanerochaete, Pleurotus, Trametes, Chrysosporium, Saccharomyces, Stenotrophamonas, Schizosaccharomyces, Yarrowia, or Streptomyces.

### Plant Cultures and Regeneration

[0994] In one embodiment, the modified plants or plant cells may be cultured to regenerate a whole plant which possesses the transformed or modified genotype and thus the desired phenotype. Examples of regeneration techniques include those relying on manipulation of certain phytohormones in a tissue culture growth medium, relying on a biocide and/or herbicide marker which has been introduced together with the desired nucleotide sequences, obtaining from cultured protoplasts, plant callus, explants, organs, pollens, embryos or parts thereof.

### Detecting Modifications in the Plant Genome-Selectable Markers

[0995] When the compositions, systems, and methods are used to modify a plant, suitable methods may be used to confirm and detect the modification made in the plant. In some examples, when a variety of modifications are made, one or more desired modifications or traits resulting from the modifications may be selected and detected. The detection and confirmation may be performed by biochemical and molecular biology techniques such as Southern analysis, PCR, Northern blot, S1 RNase protection, primer-extension or reverse transcriptase-PCR, enzymatic assays, ribozyme activity, gel electrophoresis, Western blot, immunoprecipitation, enzyme-linked immunoassays, in situ hybridization, enzyme staining, and immunostaining.

[0996] In some cases, one or more markers, such as selectable and detectable markers, may be introduced to the plants. Such markers may be used for selecting, monitoring, isolating cells and plants with desired modifications and traits. A selectable marker can confer positive or negative selection and is conditional or non-conditional on the presence of external substrates. Examples of such markers include genes and proteins that confer resistance to antibiotics, such as hygromycin (hpt) and kanamycin (nptII), and genes that confer resistance to herbicides, such as phosphinothricin (bar) and chlorosulfuron (als), enzyme capable of producing or processing a colored substances (e.g., the β-glucuronidase, luciferase, B or C1 genes). Applications in fungi

[0997] The compositions, systems, and methods described herein can be used to perform efficient and cost-effective gene or genome interrogation or editing or manipulation in fungi or fungal cells, such as yeast. The approaches and applications in plants may be applied to fungi as well.

[0998] A fungal cell may be any type of eukaryotic cell within the kingdom of fungi, such as phyla of Ascomycota, Basidiomycota, Blastocladiomycota, Chytridiomycota, Glomeromycota, Microsporidia, and Neocallimastigomycota. Examples of fungi or fungal cells in include yeasts, molds, and filamentous fungi.

[0999] In one embodiment, the fungal cell is a yeast cell. A yeast cell refers to any fungal cell within the phyla Ascomycota and Basidiomycota. Examples of yeasts include budding yeast, fission yeast, and mold, S. cerervisiae, Kluyveromyces marxianus, Issatchenkia orientalis, Candida spp. (e.g., Candida albicans), Yarrowia spp. (e.g., Yarrowia lipolytica), Pichia spp. (e.g., Pichia pastoris), Kluyveromyces spp. (e.g., Kluyveromyces lactis and Kluyveromyces marxianus), Neurospora spp. (e.g., Neurospora crassa), Fusarium spp. (e.g., Fusarium oxysporum), and Issatchenkia spp. (e.g., Issatchenkia orientalis, Pichia kudriavzevii and Candida acidothermophilum).

[1000] In one embodiment, the fungal cell is a filamentous fungal cell, which grow in filaments, e.g., hyphae or mycelia. Examples of filamentous fungal cells include Aspergillus spp. (e.g., Aspergillus niger), Trichoderma spp. (e.g., Trichoderma reesei), Rhizopus spp. (e.g., Rhizopus oryzae), and Mortierella spp. (e.g., Mortierella isabellina).

[1001] In one embodiment, the fungal cell is of an industrial strain. Industrial strains include any strain of fungal cell used in or isolated from an industrial process, e.g., production of a product on a commercial or industrial scale. Industrial strain may refer to a fungal species that is typically used in an industrial process, or it may refer to an isolate of a fungal species that may be also used for non-industrial purposes (e.g., laboratory research). Examples of industrial processes include fermentation (e.g., in production of food or beverage products), distillation, biofuel production, production of a compound, and production of a polypeptide. Examples of industrial strains include, without limitation, JAY270 and ATCC4124.

[1002] In one embodiment, the fungal cell is a polyploid cell whose genome is present in more than one copy. Polyploid cells include cells naturally found in a polyploid state, and cells that has been induced to exist in a polyploid state (e.g., through specific regulation, alteration, inactivation, activation, or modification of meiosis, cytokinesis, or DNA replication). A polyploid cell may be a cell whose entire genome is polyploid, or a cell that is polyploid in a particular genomic locus of interest. In some examples, the abundance of guide RNA may more often be a rate-limiting component in genome engineering of polyploid cells than in haploid cells, and thus the methods using the composition described herein may take advantage of using certain fungal cell types.

[1003] In one embodiment, the fungal cell is a diploid cell, whose genome is present in two copies. Diploid cells include cells naturally found in a diploid state, and cells that have been induced to exist in a diploid state (e.g., through specific regulation, alteration, inactivation, activation, or modification of meiosis, cytokinesis, or DNA replication). A diploid cell may refer to a cell whose entire genome is diploid, or it may refer to a cell that is diploid in a particular genomic locus of interest.

[1004] In one embodiment, the fungal cell is a haploid cell, whose genome is present in one copy. Haploid cells include cells naturally found in a haploid state, or cells that have been induced to exist in a haploid state (e.g., through specific regulation, alteration, inactivation, activation, or modification of meiosis, cytokinesis, or DNA replication). A haploid cell may refer to a cell whose entire genome is haploid, or it may refer to a cell that is haploid in a particular genomic locus of interest.

[1005] The compositions and systems, and nucleic acid encoding thereof may be introduced to fungi cells using the delivery systems and methods herein. Examples of delivery systems include lithium acetate treatment, bombardment, electroporation, and those described in Kawai et al., 2010, Bioeng Bugs. 2010 November-December; 1(6): 395-403.

[1006] In some examples, a yeast expression vector (e.g., those with one or more regulatory elements) may be used. Examples of such vectors include a centromeric (CEN) sequence, an autonomous replication sequence (ARS), a promoter, such as an RNA Polymerase III promoter, operably linked to a sequence or gene of interest, a terminator such as an RNA polymerase III terminator, an origin of replication, and a marker gene (e.g., auxotrophic, antibiotic, or other selectable markers). Examples of expression vectors for use in yeast may include plasmids, yeast artificial chromosomes, 2 plasmids, yeast integrative plasmids, yeast replicative plasmids, shuttle vectors, and episomal plasmids.

### Biofuel and Materials Production by Fungi

[1007] In one embodiment, the compositions, systems, and methods may be used for generating modified fungi for biofuel and material productions. For instance, the modified fungi for production of biofuel or biopolymers from fermentable sugars and optionally to be able to degrade plant-derived lignocellulose derived from agricultural waste as a source of fermentable sugars. Foreign genes required for biofuel production and synthesis may be introduced in to fungi In some examples, the genes may encode enzymes involved in the conversion of pyruvate to ethanol or another product of interest, degrade cellulose (e.g., cellulase), endogenous metabolic pathways which compete with the biofuel production pathway.

[1008] In some examples, the compositions, systems, and methods may be used for generating and/or selecting yeast strains with improved xylose or cellobiose utilization, isoprenoid biosynthesis, and/or lactic acid production. One or more genes involved in the metabolism and synthesis of these compounds may be modified and/or introduced to yeast cells. Examples of the methods and genes include lactate dehydrogenase, PDC1 and PDC5, and those described in Ha, S. J., et al. (2011) Proc. Natl. Acad. Sci. USA 108(2):504-9 and Galazka, J. M., et al. (2010) Science 330(6000):84-6; Jakociunas T et al., Metab Eng. 2015 March; 28:213-222; Stovicek V, et al., FEMS Yeast Res. 2017 Aug. 1; 17(5).

### Improved Plants and Yeast Cells

[1009] The present disclosure further provides improved plants and fungi. The improved and fungi may comprise one or more genes introduced, and/or one or more genes modified by the compositions, systems, and methods herein. The improved plants and fungi may have increased food or feed production (e.g., higher protein, carbohydrate, nutrient or vitamin levels), oil and biofuel production (e.g., methanol, ethanol), tolerance to pests, herbicides, drought, low or high temperatures, excessive water, etc.

[1010] The plants or fungi may have one or more parts that are improved, e.g., leaves, stems, roots, tubers, seeds, endosperm, ovule, and pollen. The parts may be viable, nonviable, regeneratable, and/or non-regeneratable.

[1011] The improved plants and fungi may include gametes, seeds, embryos, either zygotic or somatic, progeny and/or hybrids of improved plants and fungi. The progeny may be a clone of the produced plant or fungi, or may result from sexual reproduction by crossing with other individuals of the same species to introgress further desirable traits into their offspring. The cell may be in vivo or ex vivo in the cases of multicellular organisms, particularly plants.

### Further Applications in Plants

[1012] Further applications of the compositions, systems, and methods on plants and fungi include visualization of genetic element dynamics (e.g., as described in Chen B, et al., Cell. 2013 Dec. 19; 155(7):1479-91), targeted gene disruption positive-selection in vitro and in vivo (as described in Malina A et al., Genes Dev. 2013 Dec. 1; 27(23):2602-14), epigenetic modification such as using fusion of IscB polypeptide nuclease and histone-modifying enzymes (e.g., as described in Rusk N, Nat Methods. 2014 January; 11(1):28), identifying transcription regulators (e.g., as described in Waldrip Z J, Epigenetics. 2014 September; 9(9):1207-11), anti-virus treatment for both RNA and DNA viruses (e.g., as described in Price A A, et al., Proc Natl Acad Sci USA. 2015 May 12; 112(19):6164-9; Ramanan V et al., Sci Rep. 2015 Jun. 2; 5:10833), alteration of genome complexity such as chromosome numbers (e.g., as described in Karimi-Ashtiyani R et al., Proc Natl Acad Sci USA. 2015 Sep. 8; 112(36):11211-6; Anton T, et al., Nucleus. 2014 March-April; 5(2):163-72), self-cleavage of the composition for controlled inactivation/activation (e.g., as described Sugano S S et al., Plant Cell Physiol. 2014 March; 55(3):475-81), multiplexed gene editing (as described in Kabadi A M et al., Nucleic Acids Res. 2014 Oct. 29; 42(19):e147), development of kits for multiplex genome editing (as described in Xing H L et al., BMC Plant Biol. 2014 Nov. 29; 14:327), starch production (as described in Hebelstrup K H et al., Front Plant Sci. 2015 Apr. 23; 6:247), targeting multiple genes in a family or pathway (e.g., as described in Ma X et al., Mol Plant. 2015 August; 8(8):1274-84), regulation of non-coding genes and sequences (e.g., as described in Lowder L G, et al., Plant Physiol. 2015 October; 169(2):971-85), editing genes in trees (e.g., as described in Belhaj K et al., Plant Methods. 2013 Oct. 11; 9(1):39; Harrison M M, et al., Genes Dev. 2014 Sep. 1; 28(17):1859-72; Zhou X et al., New Phytol. 2015 October; 208(2):298-301), introduction of mutations for resistance to host-specific pathogens and pests.

[1013] Additional examples of modifications of plants and fungi that may be performed using the compositions, systems, and methods include analogous modifications described in International Patent Publication Nos. WO2016/099887, WO2016/025131, WO2016/073433, WO2017/066175, WO2017/100158, WO 2017/105991, WO2017/106414, WO2016/100272, WO2016/100571, WO 2016/100568, WO 2016/100562, and WO 2017/019867.

### Applications in Non-Human Animals

[1014] The compositions, systems, and methods may be used to study and modify non-human animals, e.g., introducing desirable traits and disease resilience, treating diseases, facilitating breeding, etc. In one embodiment, the compositions, systems, and methods may be used to improve breeding and introducing desired traits, e.g., increasing the frequency of trait-associated alleles, introgression of alleles from other breeds/species without linkage drag, and creation of de novo favorable alleles. Genes and other genetic elements that can be targeted may be screened and identified. Examples of application and approaches include those described in Tait-Burkard C, et al., Livestock 2.0—genome editing for fitter, healthier, and more productive farmed animals. Genome Biol. 2018 Nov. 26; 19(1):204; Lillico S, Agricultural applications of genome editing in farmed animals. Transgenic Res. 2019 August; 28(Suppl 2):57-60; Houston R D, et al., Harnessing genomics to fast-track genetic improvement in aquaculture. Nat Rev Genet. 2020 Apr. 16. doi: 10.1038/s41576-020-0227-y, which are incorporated herein by reference in their entireties. Applications described in other sections such as therapeutic, diagnostic, etc. can also be used on the animals herein.

[1015] The compositions, systems, and methods may be used on animals such as fish, amphibians, reptiles, mammals, and birds. The animals may be farm and agriculture animals, or pets. Examples of farm and agriculture animals include horses, goats, sheep, swine, cattle, llamas, alpacas, and birds, e.g., chickens, turkeys, ducks, and geese. The animals may be a non-human primate, e.g., baboons, capuchin monkeys, chimpanzees, lemurs, macaques, marmosets, tamarins, spider monkeys, squirrel monkeys, and vervet monkeys. Examples of pets include dogs, cats horses, wolfs, rabbits, ferrets, gerbils, hamsters, chinchillas, fancy rats, guinea pigs, canaries, parakeets, and parrots.

[1016] In one embodiment, one or more genes may be introduced (e.g., overexpressed) in the animals to obtain or enhance one or more desired traits. Growth hormones, insulin-like growth factors (IGF-1) may be introduced to increase the growth of the animals, e.g., pigs or salmon (such as described in Pursel V G et al., J Reprod Fertil Suppl. 1990; 40:235-45; Waltz E, Nature. 2017; 548:148). Fat-1 gene (e.g., from C. elegans) may be introduced for production of larger ratio of n-3 to n-6 fatty acids may be induced, e.g. in pigs (such as described in Li M, et al., Genetics. 2018; 8:1747-54). Phytase (e.g., from E. coli) xylanase (e.g., from Aspergillus niger), beta-glucanase (e.g., from Bacillus lichenformis) may be introduced to reduce the environmental impact through phosphorous and nitrogen release reduction, e.g. in pigs (such as described in Golovan S P, et al., Nat Biotechnol. 2001; 19:741-5; Zhang X et al., elife. 2018). shRNA decoy may be introduced to induce avian influenza resilience e.g. in chicken (such as described in Lyall et al., Science. 2011; 331:223-6). Lysozyme or lysostaphin may be introduced to induce mastitis resilience e.g., in goat and cow (such as described in Maga E A et al., Foodborne Pathog Dis. 2006; 3:384-92; Wall R J, et al., Nat Biotechnol. 2005; 23:445-51). Histone deacetylase such as HDAC6 may be introduced to induce PRRSV resilience, e.g., in pig (such as described in Lu T., et al., PLoS One. 2017; 12:e0169317). CD163 may be modified (e.g., inactivated or removed) to introduce PRRSV resilience in pigs (such as described in Prather R S et al.., Sci Rep. 2017 Oct. 17; 7(1):13371). Similar approaches may be used to inhibit or remove viruses and bacteria (e.g., Swine Influenza Virus (SIV) strains which include influenza C and the subtypes of influenza A known as H1N1, H1N2, H2N1, H3N1, H3N2, and H2N3, as well as pneumonia, meningitis and oedema) that may be transmitted from animals to humans.

[1017] In one embodiment, one or more genes may be modified or edited for disease resistance and production traits. Myostatin (e.g., GDF8) may be modified to increase muscle growth, e.g., in cow, sheep, goat, catfish, and pig (such as described in Crispo M et al., PLoS One. 2015; 10:e0136690; Wang X, et al., Anim Genet. 2018; 49:43-51; Khalil K, et al., Sci Rep. 2017; 7:7301; Kang J-D, et al., RSC Adv. 2017; 7:12541-9). Pc POLLED may be modified to induce horlessness, e.g., in cow (such as described in Carlson D F et al., Nat Biotechnol. 2016; 34:479-81). KISSIR may be modified to induce boretaint (hormone release during sexual maturity leading to undesired meat taste), e.g., in pigs. Dead end protein (dnd) may be modified to induce sterility, e.g., in salmon (such as described in Wargelius A, et al., Sci Rep. 2016; 6:21284). Nano2 and DDX may be modified to induce sterility (e.g., in surrogate hosts), e.g., in pigs and chicken (such as described Park K-E, et al., Sci Rep. 2017; 7:40176; Taylor L et al., Development. 2017; 144:928-34). CD163 may be modified to induce PRRSV resistance, e.g., in pigs (such as described in Whitworth K M, et al., Nat Biotechnol. 2015; 34:20-2). RELA may be modified to induce ASFV resilience, e.g., in pigs (such as described in Lillico S G, et al., Sci Rep. 2016; 6:21645). CD18 may be modified to induce Mannheimia (Pasteurella) haemolytica resilience, e.g., in cows (such as described in Shanthalingam S, et al., roc Natl Acad Sci USA. 2016; 113:13186-90). NRAMP1 may be modified to induce tuberculosis resilience, e.g., in cows (such as described in Gao Y et al., Genome Biol. 2017; 18:13). Endogenous retrovirus genes may be modified or removed for xenotransplantation such as described in Yang L, et al. Science. 2015; 350:1101-4; Niu D et al., Science. 2017; 357:1303-7). Negative regulators of muscle mass (e.g., Myostatin) may be modified (e.g., inactivated) to increase muscle mass, e.g., in dogs (as described in Zou Q et al., J Mol Cell Biol. 2015 December; 7(6):580-3).

[1018] Animals such as pigs with severe combined immunodeficiency (SCID) may generated (e.g., by modifying RAG2) to provide useful models for regenerative medicine, xenotransplantation (discussed also elsewhere herein), and tumor development. Examples of methods and approaches include those described Lee K, et al., Proc Natl Acad Sci USA. 2014 May 20; 111(20):7260-5; and Schomberg et al. FASEB Journal, April 2016; 30(1):Suppl 571.1.

[1019] SNPs in the animals may be modified. Examples of methods and approaches include those described Tan W. et al., Proc Natl Acad Sci USA. 2013 Oct. 8; 110(41):16526-31; Mali P, et al., Science. 2013 Feb. 15; 339(6121):823-6.

[1020] Stem cells (e.g., induced pluripotent stem cells) may be modified and differentiated into desired progeny cells, e.g., as described in Heo Y T et al., Stem Cells Dev. 2015 Feb. 1; 24(3):393-402.

[1021] Profile analysis (such as Igenity) may be performed on animals to screen and identify genetic variations related to economic traits. The genetic variations may be modified to introduce or improve the traits, such as carcass composition, carcass quality, maternal and reproductive traits and average daily gain.

### Kits

[1022] In one aspect, the invention provides kits containing any one or more of the elements disclosed in the above methods and compositions. In one aspect, the invention provides a kit comprising one or more of the components described herein. In one embodiment, the kit comprises the compositions herein and instructions for using the kit. In one embodiment, the kit comprises a vector system and instructions for using the kit. In one embodiment, the kit comprises a delivery system and instructions for using the kit. In one embodiment, the kit comprises a vector system and instructions for using the kit. Elements may be provided individually or in combinations, and may be provided in any suitable container, such as a vial, a bottle, or a tube. The kits may include the ωRNA and optionally an unbound protector strand as described herein. The kits may include the ωRNA with a protector strand bound to at least partially to a reprogrammable spacer portion of the ωRNA sequence (i.e., phRNA). Thus the kits may include the phRNA in the form of a partially double stranded nucleotide sequence as described here. In one embodiment, the kit includes instructions in one or more languages, for example in more than one language. The instructions may be specific to the applications and methods described herein.

[1023] In one embodiment, a kit comprises one or more reagents for use in a process utilizing one or more of the elements described herein. Reagents may be provided in any suitable container. For example, a kit may provide one or more reaction or storage buffers. Reagents may be provided in a form that is usable in a particular assay, or in a form that requires addition of one or more other components before use (e.g., in concentrate or lyophilized form). A buffer can be any buffer, including but not limited to a sodium carbonate buffer, a sodium bicarbonate buffer, a borate buffer, a Tris buffer, a MOPS buffer, a HEPES buffer, and combinations thereof. In one embodiment, the buffer is alkaline. In one embodiment, the buffer has a pH from about 7 to about 10. In one embodiment, the kit comprises one or more oligonucleotides corresponding to a ωRNA scaffold, reprogrammable sequence for insertion into a vector so as to operably link the ωRNA sequence and a regulatory element. In one embodiment, the kit comprises a homologous recombination template polynucleotide. In one embodiment, the kit comprises one or more of the vectors and/or one or more of the polynucleotides described herein. The kit may advantageously allow to provide all elements of the systems of the invention.

[1024] The invention is further described in the following examples, which do not limit the scope of the invention described in the claims.

[1025] Further embodiments are illustrated in the following Examples which are given for illustrative purposes only and are not intended to limit the scope of the invention.

### EXAMPLES

### Example 1

[1026] FIG. 1 shows the IscB cleavage of an endogenous target and a non-endogenous target sequence, with sequences comprising TAMs 1-3 showing cleavage when using a complementary spacer using the K. racemifer IscB protein, ωRNA scaffold and spacers for endogenous target Kr (FIG. 1, left) and non-endogenous target Fn (FIG. 1, right). Cleavage with TAM sequences 1-3 agrees with TAM weblogo identified for K. racmifer IscB in FIG. 2.

[1027] FIG. 2 shows determination of TAM for an IscB polypeptide Polypeptide. Sequences utilized in the experiment

>IscB protein sequence (from K. racemifer)
(SEQ ID NO: 2059)
MNVVYVLSPERTPLMPCQPAIARLLLKQGKAKVRHRTPFT
IQLLAQPEHVYTQPLTHGVDTGSSIIGSAVANEHGHVVYL
SEVEIRNDIANTMKERARARRNRRQRKTRYRPARWLNRKK
SIKTGRFSPTMRSKIDTHLREIRFIRSLLPITSTILETGS
FDPYALRNPEVLQKKWLYQRGINYGFANTKAYVLTRDGYL
CQQCKGKSKDRRLEVHHIIFRSRNGSDEEANLLTLCKTCH
DGLHAGTITLKLTGKKKGTLQHATQMNSIRIQLLKRVEAE
ETWGFVTKEHRLLVGLPKEHIFDAAVIATRGVKPTFYTTS
VLSKHCVSDGDYKQTKGKHGQQRVNTGKIMGFRKFDKVYY
LGKEYFIKGRMSTGYAILMDIDGNKIEFKPLPKFDKMKRV
SARSSWMMKQRTTPNPSFSITSSLSASAGKNV*
>ORNA scaffold sequence
(SEQ ID NO: 2060)
GTGAACTACCACTGAGCTGAAGACGCAGTGGCTTCTTCGG
AAGTCACTGAAGACGCAGACCAGGAGCTCCTTCGGAAGCT
TGAGTTCACCAGACTCGTTTCCAGAAATGGGAACAGCGTT
CGATTGGTCATGACACCTGCGGTTGACGCATCAGACCGCT
GCTCTGTCGCTGAGGGTTAAGTAGGCTTGAGGAAAGGGCC
GGTGCTCTCAGCGCAAAAAGCCTTTTGAACACTGTCGAGA
TGAAGCCGGATTCCCTTCGTGGTCACAGCGAAGGGATACG
CACCACCCGGCGCTTGCCGGAGCATTTTCCGAAAGGAGTT
TT
>Kr spacer sequence (endogenous spacer)
(SEQ ID NO: 2061)
GAAGAAGAGGCCGCACCCGTTTGAGGCCGCACCAAAT
>Fn spacer sequence
(SEQ ID NO: 2062)
CAAGCTTTTTAACAGTGGCCTTATTAAATGACTTCTC

[1028] FIG. 3 provides a sequence logo of the N terminal domain from an alignment of the 1004 representative IscB loci with conserved motifs boxed and annotated. While exact residues and domain size may vary, there are identified conserved motifs in the cluster of loci of IscBs at 60% identity and 70% coverage.

[1029] FIG. 4 includes a sequence alignment of this cluster of IscB loci, that span a majority of existing IscB sequences. Provided in the table are approximate conserved portions of the ωRNA scaffold without the reprogrammable spacer, and IscB protein. The conserved region on the 5′ region may vary, but generally identifies the approximate location where the spacer and conserved hRNA scaffold region would meet. The hRNA scaffold region and the IscB protein, along with identifying IscB loci information are detailed in Table 1.

[1030] FIG. 5 shows the consensus sequence from IscB loci of Table 1.

### Example 2—IscB Genome Editing Methods

[1031] Mammalian cell culture experiments were performed in the HEK293FT line (American Type Culture Collection (ATCC)), which was grown in Dulbecco's Modified Eagle Medium with high glucose, sodium pyruvate, and GlutaMAX (Thermo Fisher Scientific), additionally supplemented with 1× penicillin-streptomycin (Thermo Fisher Scientific) and 10% fetal bovine serum (VWR Seradigm). Transfections were performed with Lipofectamine 2000 (Thermo Fisher Scientific) in 96-well plates. Cells were plated at approximately 20,000 cells/well 16 hours prior to transfection to ensure 90% confluency at the time of transfection.

[1032] For each well on the plate, 300 ng guideRNA expression plasmid, pHS0812_Isc_large_27 (FIG. 8A) and 150 ng IscB expression plasmid, pHS0810_IscB_large_27 (FIG. 8B) were combined with OptiMEM I Reduced Serum Medium (Thermo Fisher) to a total of 10 μl. Separately, 9.2 μl of OptiMEM was combined with 0.8 μl of Lipofectamine 2000. Plasmid and Lipofectamine solutions were then combined and incubated for 5 minutes, after which they were pipetted onto cells.

[1033] After 72 hours, genomic DNA was harvested from the cells by adding 50 uL of QuickExtract DNA Extraction Solution (Lucigen) and incubating at 65 C for 15 min, 68 C for 15 min and 95C for 10 min. The extracted genomic DNA was then subjected to two rounds of PCR to amplify the target site and add Illumina adaptors and sample barcodes using NEBNext High-Fidelity 2×PCR Master Mix (New England Biolabs). The library was then subjected to next generation sequencing on an Illumina MiSeq. Indel rate was evaluated using the CRISPResso2 pipeline (Clement et. al., Nat. Biotech. 2019) using a quantification window center of −8 and size 5.

[1034] FIG. 6A-6C shows (6A) Weblogo indicating the TAMs identified in this study; (6B) Indel frequency compared to negative control condition at VEGFA site 2; and (6C) Representative indels at VEGFA site 2.

[1035] FIG. 7A-7B. IscB Protein sequence utilized in this example and the studies shown in FIG. 6A-6C, and

(7A) OGEU01000025.1
(SEQ ID NO: 2063)
MMAVVYVISKSGKPLMPTTRCGHVRILLKEGKARVVERKP
FTIQLTYESAEETQPLVLGIDPGRTNIGMSVVTESGESVF
NAQIETRNKDVPKLMKDRKQYRMAHRRLKRRCKRRRRAKA
AGTAFEEGEKQRLLPGCFKPITCKSIRNKEARFNNRKRPV
GWLTPTANHLLVTHLNVVKKVQKILPVAKVVLELNRFSFM
AMNNPKVQRWQYQRGPLYGKGSVEEAVSMQQDGHCLFCKH
GIDHYHHVVPRRKNGSETLENR VGLCEEHHRL VHTDKE
WEANLASKKSGMNKKYHALSVLNQIIPYLADQLADMFPGN
FCVTSGQDTYLFREEHGIPKDHYLDAYCIACSALTDAKKV
SSPKGRPYMVHQFRRHDRQACHKANLNRSYYMGGKLVATN
RHKAMDQKTDSLEEYRAAHSAADVSKLTVKHPSAQYKDMS
RIMPGSILVSGEGKLFTLSRSEGRNKGQVNYFVSTEGIKY
WARKCQYLRNNGGLQIYV*
and
(7B) its >ωRNA scaffold sequence
(SEQ ID NO: 2064)
GGCTCTTCCAACTTTATGGTTGCGACCGTAGGTTGAAAGA
GCACAGGCTGAGACATTCGTAAGGCCGAAAGACCGGACGC
ACCCTGGGATTTCCCCAGTCCCCGGAACTGCATAGCGGAT
GCCAGTTGATGGAGCAATCTATCAGATAAGCCAGGGGGAA
CAATCACCTCTCTGTATCAGAGAGAGTTTTACAAAAGGAG
GAACGG.

### Example 3—the Widespread IS200/605 Transposon Family Encodes Diverse Re-Targetable RNA-Guided Endonucleases

[1036] The prokaryotic RNA-guided defense system CRISPR-Cas9 (type II CRISPR-Cas), which has been adopted for genome editing in eukaryotic cells (Zhang, F. (2019), Quarterly Reviews of Biophysics 52; Hille, F, et al. (2018), Cell 172: 1239-1259), is thought to have evolved from IscB proteins (3). Despite its wide distribution across prokaryotes and shared domain composition and architecture with Cas9, the function of IscB remains unknown (FIG. 43). Moreover, given that IscB has not been reported to be associated with non-coding RNA (ncRNA) or CRISPR arrays, the evolutionary origins of the RNA-guided activity in Cas9 systems are unclear. IscB is encoded by a distinct subset of IS200/605 superfamily transposons that also include transposons encoding tnpB, a putative endonuclease distantly related to iscB and thought to be the ancestor of Cas12, the type V CRISPR effector (Kapitonav, V. et al. (2015), J. Bacteriol. 198, 797-807; Siguir, P. et al. (2014), FEMS Microbiol. Rev. 38, 865-891; S. Shmakov, S. et al. (2017), Nat. Rev. Microbiol. 15, 169-182). Using phylogenetic analysis, RNA-seq, and biochemical experiments, Applicants sought to elucidate the functions of these proteins and the origin of RNA-guided activity in class 2 CRISPR systems.

IscB is Associated with an Evolutionarily Conserved Non-Coding RNA

[1037] IscB is ˜400 amino acids (aa) long and contains a RuvC endonuclease domain split by the insertion of a bridge helix (BH) and an HNH endonuclease domain, an architecture that is shared with Cas9 (FIG. 1A) (Kapitonav, V. et al. (2015), J. Bacteriol. 198, 797-807).Applicants performed a comprehensive search for proteins containing an HNH or a split RuvC endonuclease domain and found that Cas9 and IscB were the only proteins that contained both domains. This search also showed that IscB contains a previously unidentified N-terminus that lacks clear homology to known domains and is absent in Cas9, which is denoted PLMP after its conserved sequence motifs (FIG. 9A, FIG. 10). Clustering and phylogenetic analysis of the combined RuvC, BH, and HNH domains strongly suggests that all extant Cas9s descended from a single ancestral IscB (FIG. 9B). Applicants searched for CRISPR arrays adjacent to iscB genes from each cluster and found 6 distinct groups of IscB, containing 16 clusters (of 603 total), that were CRISPR-associated, contrary to previous observations (Kapitonav, V. et al. (2015), J. Bacteriol. 198, 797-807). CRISPR-associated IscBs were scattered around the IscB phylogenetic tree, suggesting they evolved independently, with one association event leading to the Cas9 lineage (FIG. 9B). In total Applicants identified 31 unique CRISPR-associated iscB loci (of 2811 total).

[1038] Given their association with CRISPR arrays, Applicants suspected that the rarely occurring CRISPR-associated IscBs may be RNA-guided nucleases. Applicants first examined a cluster of CRISPR-associated IscBs similar to non-CRISPR associated IscBs (at ˜50% aa identity).Applicants heterologously expressed a representative locus from this clade in E. coli and performed small RNA-seq, which showed expression of not only the CRISPR array, but also a 329-bp intergenic region between the CRISPR array and the IscB open reading frame (ORF) (FIG. 9C). Applicants purified the IscB protein and sequenced the co-purified RNA, demonstrating that this protein interacts with a single ncRNA component, encompassing both the CRISPR array and this intergenic region (FIG. 9C).

[1039] Given its interaction with a ncRNA that includes the CRISPR direct repeat (DR) and spacer, as well as its similar domain architecture to Cas9, Applicants tested this IscB for RNA-guided endonuclease activity. Using a previously established protospacer adjacent motif (PAM)-discovery assay (Table 12) (Zetsche, B. et al. (2015), Cell. 163, 759-771), Applicants observed depletion of specific PAM sequences (FIG. 9D, FIG. 46A-C), indicating that CRISPR-associated IscBs are reprogrammable RNA-guided nucleases. Applicants confirmed this enzymatic activity with an in vitro cleavage assay using recombinant ribonucleoprotein (RNP) complexes (FIG. 9E).

[1040] Our finding that IscB functionally associated with CRISPR at least once, and likely on additional occasions, suggested that IscB systems more generally share a core ancestral ncRNA gene that is prone to evolving into a CRISPR array and in some cases a separate trans-acting tracrRNA (Deltcheva, E, et al. (2011), Nature. 471, 602-607). To test this hypothesis, Applicants aligned 563 non-redundant iscB loci and searched for conserved nucleotide (nt) sequences either upstream or downstream of the iscB ORF. This analysis revealed a highly conserved intergenic region ˜300 bp in length upstream of the ORF with a drop in conservation at the 5′ end, which corresponds to an IS200/605 transposon end. Secondary structure predictions for individual sequences revealed the presence of multiple G:U pairs (FIG. 11), suggesting that the conserved region encodes an ncRNA containing functionally important hairpins, which Applicants named ωRNA. Small RNA-seq on a sample of Ktedonobacter racemifer strain SOSP1-21, a soil bacterium that harbors 49 IscB loci in its genome (Kapitonav, V. et al. (2015), J. Bacteriol. 198, 797-807), demonstrated expression of the predicted ωRNA in many of these loci (FIG. 9F, FIGS. 12, 13A). Moreover, Applicants observed that the transcripts consistently extended beyond the conservation boundary at the 5′ end.

[1041] An RFAM search for potential homologs of the ωRNA showed that the conserved region of the ωRNA partially matched the previously reported HEARO RNA, a ncRNA that was found upstream of HNH domain-containing proteins, which at the time were thought to be homing endonucleases (Kalvari E, et al. (2021), Nucleic Acids Res. 49, D192-D200; Weinberg, Z. et al. (2009), Nature. 462, 656-659). However, the RFAM search did not provide any clues about the nature of the 5′-terminal non-conserved portion of these transcripts. Comparison of the consensus CRISPR-associated IscB ncRNA and the covariance folded ωRNA secondary structures revealed high degrees of structural and sequence similarity, particularly in shared multi-stem regions and pseudoknots (FIG. 9G, FIG. 47A-B, Supplementary Text). Most importantly, Applicants inferred that the 5′-most non-conserved sequence in the ωRNA might function as a guide sequence, because the sequence immediately downstream was predicted to form hairpins that structurally resembled the hairpins formed by the DR/anti-repeat duplex in the CRISPR-associated IscB ncRNA (FIG. 9G).

TABLE 8
Expression plasmids used in this study.

| Plasmid name | Description | Associated Figures |
|---|---|---|
| Expression plasmids | | |
| pHS0570 | pET45b(+) T7/LacO His14- | FIGS. 9C, E |
| | MBP-bdSUMO-CRISPR | |
| | associated IscB-TwinStrep | |
| pHS0578 | CRISPR associated IscB non- | FIG. 9C |
| | coding locus in pColA-Duet | |
| pHS0663 | pET45b(+) KraIscB-1 | FIG. 13A |
| | TwinStrep | |
| pHS0667 | KraIscB-1 non-coding locus in | FIG. 13A |
| | pCOLADuet-1 | |
| pHS0781 | pcDNA3.1(+) CMV-SV40 | |
| | NLS-AwaIscB-nucleoplasmin | |
| | NLS-3xHA | |
| pHS0806 | pET45b(+) His14-bdSUMO- | FIGS. 15E-G; FIG. 17; FIG. 18; |
| | AwaIscB | FIG. 19 |
| pHS0810 | pcDNA3.1(+) CMV-SV40 | FIGS. 39F-G; FIG. 40 |
| | NLS-OgeuIscB-nucleoplasmin | |
| | NLS-3xHA | |
| pHS0812 | hU6-BpiI-OgeuIscB | FIGS. 39F-G; FIG. 40 |
| | omegaRNA scaffold | |
| pHS0766 | pET45b(+) His14-MBP-TEV- | FIG. 61A |
| | AloTnpB-2 3′ extension | |
| Locus plasmids | | |
| pHS0537 | CRISPR-associated IscB locus | FIGS. 9C-D |
| | (Delaware Bay) in pBR322 | |
| | with Fn spacer | |
| pHS0535 | CRISPR-associated IscB | FIGS. 46A-46C |
| | (Chesapeake Bay) in pBR322 | |
| | with Fn spacer | |
| PAM/TAM libraries | | |
| pUC19 Fn 8N library | Fn | FIGS. 15B-D; FIGS. 39D,E,I,H; |
| | | FIG. 48; FIG. 61B |
| pACYC Fn 8N library | Fn | FIG. 1D; FIGS. 46A-46C |
| pACYC KraIscB-1 | KraIscB-1 endogenous target | FIGS. 15B-C |
| endogenous target 8N library | | |

### IscB is a Reprogrammable RNA-Guided DNA Endonuclease

[1042] To test whether IscB was capable of cleaving DNA complementary to the putative ωRNA guide, Applicants performed an in vitro plasmid cleavage assay with KraIscB-1 using an in vitro transcription/translation (IVTT) expression system (FIG. 15A, 15B). Applicants found that KraIscB-1 cleaved the target in an ωRNA-dependent manner, with an ATAAA 3′ target-adjacent motif (TAM) (FIG. 2C). Retargeting of KraIscB-1 using a different guide (Fn guide) (Zetsche, B. et al. (2015), Cell. 163, 759-771) also mediated cleavage of the cognate target (FIG. 15C, FIG. 13B), implying that IscB is a reprogrammable RNA-guided nuclease.

[1043] Next, Applicants biochemically characterized IscB in vitro. Applicants identified activity in 57/86 (660%) selected phylogenetically diverse systems (Table 9) as determined by the identification of a TAM (FIG. 48). Of these 57 functional IscBs, 5 could be reconstituted with the respective ωRNA in vitro to achieve efficient target cleavage, and from those, Applicants selected AwaIscB (from Allochromatium warmingii) for detailed biochemical characterization (FIG. 15D-15G).

[1044] Applicants confirmed the ability of recombinant AwaIscB to cleave multiple dsDNA targets in a programmable manner (FIG. 15E) and showed that the activity of AwaIscB is magnesium-dependent with a temperature optimum from 35-40° C. (FIG. 17A, B). Appreciable activity was observed in vitro with guide lengths between 15 and 45 nt (FIG. 17D). Mutation of the catalytic RuvC-II residue (E157A) abolished the nucleolytic activity on the non-target DNA strand, whereas the HNH domain catalytic mutant H212A abolished the nucleolytic activity on the target strand (FIG. 15F). Combination of the E157A and H212A mutations (dAwaIscB) abolished all dsDNA nucleolytic activity (FIG. 15F) (Jinek, M, et al. (2012), Science 337, 816-821; Gasiunas, G. et al. (2020), Nat. Commun. 11, 55). Sequencing of the cleavage products showed that AwaIscB cleaves the target strand 3 nt upstream of the TAM, similar to Cas9s (Gasiunas G, et al. (2020), Nat. Commun. 11, 5512).

[1045] Cleavage of the non-target strand occurred 8 or 12 nt upstream of the TAM, generating 5- or 9-nt long 5′ overhangs (FIG. 15G, FIG. 18). Exonuclease III mapping of a target substrate engaged by the dAwaIscB-ωRNA RNP showed that the RNP hindered exonuclease III treatment 19 nt upstream of the TAM on the target strand and 6 nt downstream of the targeted sequence on the non-target strand (FIG. 19) (Jinek, M. et al. (2014), Science. 343, 1247997). Applicants also found that truncation of more than 4 aa of the PLMP domain of AwaIscB abolished cleavage activity (FIG. 49). Amino acid sequences for the proteins of Table 9 and the DNA sequences of their omegaRNAs correspond to SEQ ID NOs. 2059 to 2530.

TABLE 9
Contig accessions and sequence information for experimentally tested IscBs.

| | Cluster | | | Consensus TAM |
|---|---|---|---|---|
| Contig Accession | ID | Key name | Source organism/taxonomy (if applicable) | (if functional) |
| ADVG01000004 | | KraIscB-1 | Ktedonobacter racemifer DSM 44963 | ATAAA |
| ADVG01000001.1 | 44123 | KraIscB-2 | Ktedonobacter racemifer DSM 44963 | N/A |
| ADVG01000001.1 | 52169 | KraIscB-3 | Ktedonobacter racemifer DSM 44963 | ATG |
| ADVG01000001.1 | 30772 | KraIscB-4 | Ktedonobacter racemifer DSM 44963 | ATMAA |
| ADVG01000004.1 | 31896 | KraIscB-5 | Ktedonobacter racemifer DSM 44963 | GTGAA |
| ADVG01000004.1 | 30772 | KraIscB-6 | Ktedonobacter racemifer DSM 44963 | N/A |
| AZFH01000048.1 | 41499 | LeqIscB1 | Lactobacillus equi DSM 15833 = JCM 10991 | N/A |
| AZRL01000003.1 | 20578 | PolIscB1 | Petrotoga olearia DSM 13574 | NTGAD |
| AZRL01000004.1 | 49815 | PolIscB2 | Petrotoga olearia DSM 13574 | VTGA |
| AZRM01000012.1 | 41273 | PmiIscB1 | Petrotoga miotherma DSM 10691 | TTRA |
| BAMK01000010.1 | 26262 | LcoIscB1 | Lactobacillus composti DSM 18527 | TTRA |
| BBBW01000007.1 | 40542 | LecIscB1 | Lactobacillus equicursoris DSM 19284 = JCM 14600 | TTGAA |
| CP001393.1 | 23802 | CbeIscB1 | Caldicellulosiruptor bescii DSM 6725 | GBGDDD |
| CP001393.1 | 36486 | CbeIscB2 | Caldicellulosiruptor bescii DSM 6725 | N/A |
| CP001814.1 | 12901 | SroIscB1 | Streptosporangium roseum DSM 43021 | DTG |
| CP001896.1 | 29247 | AviIscB1 | Allochromatium vinosum DSM 180 | RTG |
| CP015439.1 | 49704 | AamIscB1 | Anoxybacillus amylolyticus strain DSM 15939 | ATGAH |
| | | | plasmid pDSM15939_1 | |
| CP026105.1 | 44770 | PhoIscB1 | Paraburkholderia hospita strain DSM 17164 | ATG |
| CP026105.1 | 44770 | PhoIscB2 | Paraburkholderia hospita strain DSM 17164 | ATGA |
| FMXB01000023.1 | 65074 | MmiIscB1 | Methanobrevibacter millerae strain DSM 16643 | ATGA |
| FMXR01000006.1 | 46359 | EoxIscB1 | Eubacterium oxidoreducens strain DSM 3217 | ATGA |
| FNDL01000011.1 | 18054 | FchIscB1 | Fervidobacterium changbaicum strain DSM 17883 | N/A |
| FNDL01000023.1 | 32003 | FchIscB2 | Fervidobacterium changbaicum strain DSM 17883 | GTGA |
| FNOW01000019.1 | 44770 | AwaIscB1 | Allochromatium warmingii strain DSM 173 | ATGA |
| FOXR01000041.1 | 18054 | CfaIscB1 | Caldicoprobacter faecalis strain DSM 20678 | ATGAH |
| FPAI01000021.1 | 27545 | HmiIscB1 | Halolactibacillus miurensis strain DSM 17074 | N/A |
| FPBV01000023.1 | 47441 | AmaIscB1 | Alicyclobacillus macrosporangiidus strain DSM 17980 | RTGG |
| FQZM01000035.1 | 36667 | DthIscB1 | Desulfotomaculum thermosubterraneum DSM 16057 | GTGA |
| FRDJ01000006.1 | 18054 | FgoIscB1 | Fervidobacterium gondwanense DSM 13020 | ATGAH |
| FWXY01000026.1 | 22166 | DvaIscB1 | Desulfobacterium vacuolatum DSM 3385 | NTAAA |
| JAAGRP010000061.1 | 53804 | DhyIscB1 | Desulfobacter hydrogenophilus strain DSM 3380 | NNGA |
| JAFA01000051.1 | 44770 | PnoIscB1 | Paraburkholderia nodosa DSM 21604 | ATGA |
| JFHC01000001.1 | 44770 | CglIscB1 | Caballeronia glathei strain DSM 50014 | ATGA |
| JMKS01000001.1 | 71441 | EanIscB1 | Exiguobacterium antarcticum DSM 14480 | ATGA |
| JQSG02000004.1 | 44770 | AprIscB1 | Acidihalobacter prosperus strain DSM 5130 | ATGA |
| KE386494.1 | 36667 | CpoIscB1 | Caldanaerobius polysaccharolyticus DSM 13641 | GTGA |
| KE387209.1 | 17533 | AauIscB1 | Azohydromonas australica DSM 1124 | ATG |
| KI535313.1 | 58923 | EceIscB1 | Enterococcus cecorum DSM 20682 = ATCC 43198 | ATG |
| LMBW01000001.1 | 30772 | BhuIscB1 | Bacillus humi strain DSM 16318 | ATAAA |
| LT607411.1 | 34693 | MviIscB1 | Micromonospora viridifaciens strain DSM 43909 | ATGA |
| LT607751.1 | 34693 | MsiIscB1 | Micromonospora siamensis strain DSM 45097 | NTG |
| LWAE01000002.1 | 54479 | CmaIscB1 | Clostridium magnum DSM 2767 | N/A |
| LWAE01000013.1 | 54479 | CmaIscB2 | Clostridium magnum DSM 2767 | N/A |
| NWBQ01000011.1 | 44770 | MbiIscB1 | Macromonas bipunctata strain DSM 12705 | VTGA |
| NWBQ01000013.1 | 44770 | MbiIscB2 | Macromonas bipunctata strain DSM 12705 | VTG |
| SAUN01000001.1 | 51289 | NpoIScB1 | Nonomuraea polychroma strain DSM 43925 | N/A |
| SMBX01000003.1 | 44770 | PsoIscB1 | Paracandidimonas soli strain DSM 100048 | ATGA |
| SMKY01000017.1 | 12901 | AdaIscB1 | Actinomadura darangshiensis strain DSM 45941 | GTGAA |
| SMKY01000166.1 | 12901 | AdaIscB2 | Actinomadura darangshiensis strain DSM 45941 | NTGAA |
| UESZ01000001.1 | 865 | BheIscB1 | Branchiibius hedensis strain DSM 22951 | GGGGHG |
| VFEU01000027.1 | 44683 | PrhIscB1 | Pseudomonas rhodesiae strain DSM 14020 | ATGA |
| QUIR01000011.1 | 21516 | QuirIscB1 | Ruminococcus sp. AM40-10AC | ATGA |
| JH724136.1 | 14084 | BdoIscB1 | Bacteroides dorei CL02T12C06 | N/A |
| QSPK01000009.1 | 32498 | EstIscB1 | Eubacterium sp. TM05-53 | N/A |
| FMDX01000002.1 | 29934 | FmdxIscB1 | uncultured Clostridium sp. isolate 2789STDY5834874 | N/A |
| CP027167.1 | 44683 | PaeIscB1 | Pseudomonas aeruginosa strain AR_0356 plasmid | ATGA |
| | | | unnamed3 | |
| FMGK01000008.1 | 58923 | FmgkIscB1 | uncultured Clostridium sp. isolate 2789STDY5834935 | ATMAA |
| QULK01000019.1 | 58923 | RsoIscB1 | Ruminococcus sp. OM05-10BH | N/A |
| KB976725.1 | 60626 | BceIscB1 | Bacillus cereus VD136 | TTRA |
| RCAL01000070.1 | 40565 | EcoIscB1 | Escherichia coli strain B8110 | N/A |
| QUIP01000016.1 | 6379 | QuipIscB1 | Ruminococcus sp. AM42-10AC | N/A |
| CP006668.1 | 44770 | RpiIscB1 | Ralstonia pickettii DTP0602 | N/A |
| UKSF01000002.1 | 39989 | KpnIscB1 | Klebsiella pneumoniae strain EuSCAPE_IT215 | NBRA |
| QUIS01000016.1 | 21516 | QuisIscB1 | Ruminococcus sp. AM36-17 | NTGA |
| OEZH01000093.1 | 63259 | CdiIscB1 | Clostridioides difficile strain 173070 | NTAAR |
| QTWT01000019.1 | 1420 | QtwtIscB1 | Ruminococcus sp. AF18 | N/A |
| CABVRB010000040.1 | 61670 | AbuIscB1 | Arcobacter butzleri isolate Ab_1711 | ATGADRD |
| LFOD01000003.1 | 24531 | McoIscB1 | Mycolicibacterium conceptionense strain MLE | N/A |
| QUIO01000086.1 | 26022 | QuioIscB1 | Ruminococcus sp. AM42-11 | N/A |
| DEGM01000152.1 | 69876 | DegmIscB1 | Lachnospiraceae bacterium UBA2826 | N/A |
| OWZO01000071.1 | 6594 | OwzoIscB1 | human gut metagenome genome assembly, contig: | NTAAA |
| | | | NODE_724_length_33230_cov_4.750505, whole | |
| | | | genome shotgun sequence \| SOURCE: WGS DATE: | |
| | | | 2019 Jan. 27 GENOME_ID: 10741 CONTIG_ID: 723 | |
| | | | GENOME_ACC: ORRM01.1 | |
| UPEL01000159.1 | 54268 | UpelIscB1 | human gut metagenome genome assembly, contig: | N/A |
| | | | NODE_159_length_75563_cov_9.847632 | |
| OIZI01004561.1 | 1922 | OiziIscB1 | human gut metagenome genome assembly, contig: | NNAAA |
| | | | NODE_4561_length_4588_cov_3.294066 | |
| OWFL01000025.1 | 2221 | OwflIscB1 | human gut metagenome genome assembly, contig: | NNAAA |
| | | | NODE_25_length_213871_cov_13.923256, whole | |
| | | | genome shotgun sequence \| SOURCE: WGS DATE: | |
| | | | 2019 Jan. 27 GENOME_ID: 11957 CONTIG_ID: 24 | |
| | | | GENOME_ACC: OWFL01.1 | |
| UPFJ01002787.1 | 14824 | UpfjIscB1 | human gut metagenome genome assembly, contig: | NTAAA |
| | | | NODE_2787_length_13531_cov_3.087266 | |
| ORVI01000029.1 | 11690 | OrviIscB1 | human gut metagenome genome assembly, contig: | N/A |
| | | | NODE_29_length_154150_cov_4.224790, whole | |
| | | | genome shotgun sequence \| SOURCE: WGS DATE: | |
| | | | 2019 Jan. 27 GENOME_ID: 10841 CONTIG_ID: 28 | |
| | | | GENOME_ACC: ORVI01.1 | |
| UWST01001880.1 | 26698 | UwstIscB1 | mouse gut metagenome genome assembly, contig: | ATAA |
| | | | NODE_1880_length_30065_cov_4.990836, whole | |
| | | | genome shotgun sequence \| SOURCE: WGS DATE: | |
| | | | 2019 Jun. 6 GENOME_ID: 279225 CONTIG_ID: | |
| | | | 1879 GENOME_ACC: UWST01.1 | |
| OMBG01000014.1 | 52299 | OmbgIscB1 | human gut metagenome genome assembly, contig: | N/A |
| | | | NODE_14_length_122693_cov_23.179227 | |
| OGEU01000025.1 | 11690 | OgeuIscB1 | metagenome genome assembly, contig: | NWRRNA |
| | | | NODE_25_length_150080_cov_8.882980 | |
| AP019309.1 | 22690 | EbaIscB1 | Erysipelotrichaceae bacterium SG0102 DNA, complete | N/A |
| | | | genome \| SOURCE: NCBI_Prokaryotes DATE: | |
| | | | 2019 Jan. 27 GENOME_ID: 208690 CONTIG_ID: 0 | |
| | | | GENOME_ACC: | |
| | | | GCA_003925875.1_ASM392587v1_genomic | |
| OIXA01.1 | 46682 | HgmIscB1 | human gut metagenome genome assembly, contig: | N/A |
| | | | NODE_137_length_98666_cov_9.003610, whole | |
| | | | genome shotgun sequence \| SOURCE: WGS DATE: | |
| | | | 2019 Jan. 27 GENOME_ID: 6111 CONTIG_ID: 136 | |
| | | | GENOME_ACC: OIXA01.1 | |
| OPXW01000461.1 | 49070 | OpxwIscB1 | human gut metagenome genome assembly, contig: | N/A |
| | | | NODE_461_length_28699_cov_2.357946, whole | |
| | | | genome shotgun sequence \| SOURCE: WGS DATE: | |
| | | | 2019 Jan. 27 GENOME_ID: 9575 CONTIG_ID: 460 | |
| | | | GENOME_ACC: OPXW01.1 | |
| OMGI01003682.1 | 49070 | OmgiIscB1 | human gut metagenome genome assembly, contig: | N/A |
| | | | NODE_3682_length_6100_cov_3.653598, whole | |
| | | | genome shotgun sequence \| SOURCE: WGS DATE: | |
| | | | 2019-01-27 GENOME_ID: 8314 CONTIG_ID: 3681 | |
| | | | GENOME_ACC: OMGI01.1 | |
| QUKU01000013.1 | 6594 | QukuIscB1 | Ruminococcus sp. OM08-7 OM08-7.Scaf13, whole | N/A |
| | | | genome shotgun sequence \| SOURCE: | |
| | | | NCBI_Prokaryotes DATE: 2019 Jan. 27 GENOME_ID: | |
| | | | 172916 CONTIG_ID: 4 GENOME_ACC: | |
| | | | GCA_003481515.1_ASM348151v1_genomic | |
| QUIS01000025.1 | 21516 | QuisIscB2 | Ruminococcus sp. AM36-17 AM36-17.Scaf25, whole | N/A |
| | | | genome shotgun sequence \| SOURCE: | |
| | | | NCBI_Prokaryotes DATE: 2019 Jan. 27 GENOME_ID: | |
| | | | 172850 CONTIG_ID: 17 GENOME_ACC: | |
| | | | GCA_003480205.1_ASM348020v1_genomic | |
| JACBGJ010000050 | 4393 | LasIscB1 | Lactobacillus salivarius strain KZ-NCB | NTGA |
| | | | Lactobacillus_salivarius_contig_50, whole genome | |
| | | | shotgun sequence \| SOURCE: NCBI_Prokaryotes | |
| | | | DATE: 2020 Oct. 27 GENOME_ID: 358408 | |
| | | | CONTIG_ID: 45 GENOME_ACC: | |
| | | | GCA_013391745.1_ASM1339174v1_genomic | |
| ORRM01000724.1 | 10049 | OrrmIscB1 | human gut metagenome genome assembly, contig: | NNGNNR |
| | | | NODE_724_length_33230_cov_4.750505, whole | |
| | | | genome shotgun sequence \| SOURCE: WGS DATE: | |
| | | | 2019 Jan. 27 GENOME_ID: 10741 CONTIG_ID: 723 | |
| | | | GENOME ACC: ORRM01.1 | |
| Eukaryotic | | | | |
| KY407659 | | IteIscB1 | Ignatius tetrasporus culture UTEX: 2012 chloroplast, | NG |
| | | | complete genome | |
| CRISPR-associated IscB | | | | |
| Ga0348337_018242 | | | Delaware Bay aquatic sample metagenome | NAC |

### IscB Employ Multiple Guide-Encoding Mechanisms

[1046] A distinct advantage of RNA-guided systems is that they allow an effector to target many substrates by simply reprogramming the RNA guide. One-way IscB evolved to use multiple guides is association with CRISPR arrays (FIG. 16A). However, given that iscB loci typically encode a single ωRNA, it is unclear how or even whether these systems achieve such modularity in general. By searching for ωRNAs not directly adjacent to iscB ORFs, Applicants uncovered three additional potential mechanisms for guide encoding and switching: ωRNA arrays, transposon expansion, and standalone, trans-acting ωRNAs (FIG. 16A). ωRNA arrays consist of multiple ωRNAs, each encompassing a distinct guide, separated by up to 200 bp, and are found in 15/3356 unique IscB/IsrB loci (0.4%). Transposon expansion involves the insertion of nearly identical IS200/605 superfamily transposons in multiple locations, resulting in multiple loci per genome, each capable of expressing a nearly identical ωRNA scaffold with a unique guide (FIG. 20). By contrast, standalone ωRNAs, which show no detectable genomic associations with iscB, were more common and were found in multiple copies in some genomes. Cis ωRNAs from 95/3356 (2.8%) unique IscB/IsrB loci were nearly identical (≥95% sequence identity) to distally encoded standalone ωRNAs (FIG. 50), implying that these standalone ωRNAs could encode guides used by trans-encoded IscBs.

[1047] Applicants tested this possibility by examining 10 standalone ωRNAs in the K. racemifer genome, (FIG. 16B), 9 of which were found to be expressed (FIG. 16C, FIG. 21). Of the 6 standalone ωRNAs tested, Applicants found that 5 could mediate RNA-guided DNA cleavage with a distally encoded IscB from the same genome (FIG. 16D), demonstrating that a single IscB can use multiple trans-encoded ωRNAs. Guides from many ωRNAs, both IscB-adjacent and trans-encoded, mostly target prokaryotic genomic sequences (61.5% genomic, 0.7% plasmid, 2.0% phage, 35.8% unmatched, N=36323), suggesting a non-defense function for IscB systems (FIG. 50). In particular, Applicants found that more than a third of the ωRNAs (34.1%) targeted the same locus without the IS200/605 transposon insertion (FIG. 51).

### Evolution and Diversity of IscB Systems

[1048] Applicants next investigated the evolutionary relationships between IscB, Cas9, and other homologous proteins to gain a broader insight into the evolution of RNA-guided mechanisms. In our search for proteins containing split RuvC domains, Applicants detected another group of shorter, ˜350 aa IscB homologs that are also encoded in IS200/605 superfamily transposons. These proteins contain a PLMP domain and split RuvC but lack the HNH domain. Applicants renamed these proteins IsrB (Insertion sequence RuvC-like OrfB) to emphasize their distinct domain architecture, replacing the previous designation, IscB1 (Kapitonov, V. et al. (2015), J Bacteriol. 198, 797-807). In addition to IscB and IsrB, Applicants identified a family of even smaller (˜180 aa) proteins that only contained the PLMP domain and HNH domain but no RuvC domain, which Applicants named IshB (Insertion sequence HNH-like OrfB).

[1049] To investigate the relationships between these proteins, Applicants built a maximum likelihood (ML) tree from a multiple alignment of the split RuvC nuclease and BH domains using IQ-TREE 2 (FIGS. 22, 31A, 52, Table 11) (Mihn, B. et al (2020), Mol. Biol. Evol. 37, 1530-1534). The topology of the resulting tree was supported by several additional ML and Bayesian phylogenetic and robustness analyses ((FIGS. 22, 32-33, 35, 52-56), see Supplementary Text for details). In the resulting tree, IsrB, IscB, and Cas9 formed distinct, strongly supported clades, suggesting that each of these nucleases originated from a unique evolutionary event (FIGS. 31A, 32, 33A, 33C, 35, 54C-54D, and Supplementary Text). Applicants then analyzed the associations between each protein cluster and IS200/605 tnpA genes (Kapitonov, V. et al. (2015), J. Bacteriol. 198, 797-807), ωRNAs, CRISPR-Cas adaptation genes (cas1, cas2, cas4, and csn2), CRISPR arrays upstream and downstream of the respective ORF, and CRISPR anti-repeats (FIG. 31A). As discussed above, IscB and isrB were rarely associated with CRISPR arrays and were not found to be associated with CRISPR-Cas adaptation genes. The isrBs are associated with structurally distinct ωRNAs. The iscBs are flanked by transposon ends similar to those mobilized by TnpA (Kapitonov, V. et al. (2015), J. Bacteriol. 198, 797-807), but are only found near tnpA in 56/2811 of unique IscB loci (2.0%) (FIGS. 31A, 57D).

[1050] Additionally, Applicants identified two distinct groups of Cas9s. The first is a new subtype, II-D, a group of relatively small cas9s (˜700aa) that are not associated with any other known cas genes (Makarova, K., et al. (2020), Nat. Rev. Microbiol. 18, 67-83). The second is a distinct clade branching from within the II-C subtype, which includes exceptionally large cas9s (≥1700aa) that are associated with tnpA (FIG. 31A, FIG. 57). The tnpA-associated II-C loci often encompass unusually long DRs (more than 42 bp in length) and in some cases encode HIRAN domain proteins between the cas9 and other cas genes (FIG. 31A, FIG. 44). Predicted transposon ends surround various combinations of the tnpA, cas acquisition genes, and CRISPR arrays in these loci.

[1051] These phylogenetic and association analyses confirm that IS200/605 transposon-encoded IscBs and IsrBs share a common evolutionary history with Cas9 (Supplementary Text). Given the deep position of the IsrB clade in the tree (FIG. 31A) and the lack of the HNH domain, IsrBs likely represent the ancestral state, probably having evolved from the compact RuvC endonuclease (Majorek, K. et al. (2014), Nucleic Acids Res. 42, 4160-4179). Almost all isrBs are associated with an ωRNA, suggesting that these systems became RNA-guided at an early stage of evolution, concomitantly with the insertions in the RuvC-like domain that are likely to be involved in complex formation with ωRNA. IsrB subsequently gained the HNH domain, possibly through insertion of another mobile element or recombination with a gene encoding an IshB-like protein, founding the IscB family (gray squares, FIG. 31A-31B, Supplementary Text).

[1052] CRISPR arrays emerged within IscB systems on multiple, independent occasions (black circles, FIG. 31A-31B). These short arrays consist of repeats that could have evolved by duplication of segments of the ancestral ωRNA. The resulting systems encompass a hybrid CRISPR-ωRNA that consists of a CRISPR array preceding a partial ωRNA. These CRISPR-associated IscB proteins likely also gained REC-like insertions between the RuvC-I and RuvC-II subdomains on a number of occasions, often contemporaneously with or shortly after the CRISPR association (white squares, FIG. 31A-31B, FIG. 58). In particular, one CRISPR-associated IscB cluster (cluster 2089) apparently founded the Cas9 family (FIG. 35) upon the loss of the hallmark PLMP domain (gray square, FIG. 31A-31B, FIG. 58). Moreover, the tracrRNAs of Subtype II-D, a deep branch in the Cas9 subtree (ML branch support: ≥97/100, Bayesian posterior probability: 100%, FIG. 54B-D, FIG. 35), shows significant similarity to IscB ωRNAs (E-value 4.1e-8), suggesting that the Cas9 tracrRNA originally evolved from ωRNA (FIG. 36). The continued evolution of Cas9 apparently involved the gain of additional REC-like insertions between the bridge helix and the RuvC-II domains resulting in increased protein size (FIG. 58). Finally, upon the association with the CRISPR adaptation machinery (cas1, cas2, and possibly cas4) (light blue circles, FIG. 31A-B), a burst of Cas9 diversification and widespread dispersion among bacteria via horizontal gene transfer followed, resulting in the evolution of multiple type II CRISPR subtypes.

[1053] Applicants also explored the evolutionary history of ωRNAs. By iteratively building a set of ωRNA profiles that spanned all major groups of ωRNAs associated with iscBs and isrBs, Applicants found that diverse ωRNAs are associated with almost all iscBs and isrBs. Moreover, different IsrB and IscB clades are associated with distinct ωRNA structures (FIG. 4A, 4C, FIG. 37, FIG. 38A, FIG. 52A). The transition from isrB to iscB was likely accompanied by loss of a second pseudoknot, the adaptor pseudoknot, between the transposon end region and the multi-stem loop in isrB-associated ωRNAs (light gray square, FIG. 31A-31C). The inverse relationship between the complexity of the ωRNA structure and the associated protein size is also reflected by the simplified ωRNA structures associated with clades of large IscBs and the even smaller tracrRNAs associated with large Cas9s (FIG. 31C, FIG. 38). Accession numbers and natural targets search data are shown in Table 10.

[1054] Table 10A-H. Accession numbers and natural target search data.

TABLE 10A
RuvC_BH
N sites 208
N proteins 1853

| Model | -LnL | df | AIC | AICc | BIC |
|---|---|---|---|---|---|
| LG | 503754.123 | 3703 | 1014914.25 | 28446738.2 | 1027273.15 |
| LG + I | 501031.081 | 3704 | 1009470.16 | 28456110.2 | 1021832.4 |
| LG + G4 | 484701.308 | 3704 | 976810.616 | 28423450.6 | 989172.857 |
| LG + I + G4 | 484248.917 | 3705 | 975907.834 | 28437367.8 | 988273.413 |
| LG + F + I + G4 | 486649.626 | 3724 | 980747.252 | 28724547.3 | 993176.243 |
| WAG + I + G4 | 485319.069 | 3705 | 978048.137 | 28439508.1 | 990413.716 |
| WAG + F + I + G4 | 486966.711 | 3724 | 981381.423 | 28725181.4 | 993810.414 |
| JTT + I + G4 | 492218.062 | 3705 | 991846.123 | 28453306.1 | 1004211.7 |
| JTT + F + I + G4 | 493619.025 | 3724 | 994686.05 | 28738486.1 | 1007115.04 |
| JTTDCMut + I + G4 | 492121.288 | 3705 | 991652.576 | 28453112.6 | 1004018.15 |
| JTTDCMut + F + I + G4 | 493571.492 | 3724 | 994590.984 | 28738391 | 1007019.98 |
| DCMut + I + G4 | 495427.634 | 3705 | 998265.269 | 28459725.3 | 1010630.85 |
| DCMut + F + I + G4 | 493953.2 | 3724 | 995354.4 | 28739154.4 | 1007783.39 |
| VT + I + G4 | 484911.291 | 3705 | 977232.583 | 28438692.6 | 989598.161 |
| VT + F + I + G4 | 486476.96 | 3724 | 980401.921 | 28724201.9 | 992830.913 |
| PMB + I + G4 | 485970.164 | 3705 | 979350.329 | 28440810.3 | 991715.907 |
| PMB + F + I + G4 | 487425.47 | 3724 | 982298.94 | 28726098.9 | 994727.932 |
| Blosum62 + I + G4 | 485128.966 | 3705 | 977667.933 | 28439127.9 | 990033.511 |
| Blosum62 + F + I + G4 | 487231.102 | 3724 | 981910.204 | 28725710.2 | 994339.195 |
| Dayhoff + I + G4 | 495468.881 | 3705 | 998347.761 | 28459807.8 | 1010713.34 |
| Dayhoff + F + I + G4 | 494003.659 | 3724 | 995455.317 | 28739255.3 | 1007884.31 |
| mtREV + I + G4 | 517365.999 | 3705 | 1042142 | 28503602 | 1054507.58 |
| mtREV + F + I + G4 | 497460.523 | 3724 | 1002369.05 | 28746169 | 1014798.04 |
| mtART + I + G4 | 525196.939 | 3705 | 1057803.88 | 28519263.9 | 1070169.46 |
| mtART + F + I + G4 | 502278.647 | 3724 | 1012005.29 | 28755805.3 | 1024434.29 |
| mtZOA + I + G4 | 510552.349 | 3705 | 1028514.7 | 28489974.7 | 1040880.28 |
| mtZOA + F + I + G4 | 496519.09 | 3724 | 1000486.18 | 28744286.2 | 1012915.17 |
| mtMet + I + G4 | 517023.603 | 3705 | 1041457.21 | 28502917.2 | 1053822.79 |
| mtMet + F + I + G4 | 498462.685 | 3724 | 1004373.37 | 28748173.4 | 1016802.36 |
| mtVer + I + G4 | 525831.436 | 3705 | 1059072.87 | 28520532.9 | 1071438.45 |
| mtVer + F + I + G4 | 509246.342 | 3724 | 1025940.69 | 28769740.7 | 1038369.68 |
| mtInv + I + G4 | 516516.275 | 3705 | 1040442.55 | 28501902.6 | 1052808.13 |
| mtInv + F + I + G4 | 493117.244 | 3724 | 993682.487 | 28737482.5 | 1006111.48 |
| mtMAM + I + G4 | 534945.189 | 3705 | 1077300.38 | 28538760.4 | 1089665.96 |
| mtMAM + F + I + G4 | 513646.512 | 3724 | 1034741.02 | 28778541 | 1047170.02 |
| HIVb + I + G4 | 507589.225 | 3705 | 1022588.45 | 28484048.4 | 1034954.03 |
| HIVb + F + I + G4 | 510843.95 | 3724 | 1029135.9 | 28772935.9 | 1041564.89 |
| HIVw + I + G4 | 529355.482 | 3705 | 1066120.96 | 28527581 | 1078486.54 |
| HIVw + F + I + G4 | 526209.981 | 3724 | 1059867.96 | 28803668 | 1072296.95 |
| FLU + I + G4 | 503465.942 | 3705 | 1014341.88 | 28475801.9 | 1026707.46 |
| FLU + F + I + G4 | 506544.44 | 3724 | 1020536.88 | 28764336.9 | 1032965.87 |
| rtREV + I + G4 | 488028.849 | 3705 | 983467.697 | 28444927.7 | 995833.276 |
| rtREV + F + I + G4 | 486920.363 | 3724 | 981288.725 | 28725088.7 | 993717.717 |
| cpREV + I + G4 | 488546.347 | 3705 | 984502.694 | 28445962.7 | 996868.272 |
| cpREV + F + I + G4 | 492889.794 | 3724 | 993227.587 | 28737027.6 | 1005656.58 |

TABLE 10B
RuvC_BH_HNH
N sites 315
N proteins 1710

| Model | -LnL | df | AIC | AICc | BIC |
|---|---|---|---|---|---|
| LG | 729020.94 | 3417 | 1464875.88 | 24823487.9 | 1477698.42 |
| LG + I | 725636.107 | 3418 | 1458108.21 | 24830392.2 | 1470934.51 |
| LG + G4 | 700605.149 | 3418 | 1408046.3 | 24780330.3 | 1420872.59 |
| LG + I + G4 | 699919.215 | 3419 | 1406676.43 | 24792636.4 | 1419506.48 |
| LG + F + I + G4 | 701771.88 | 3438 | 1410419.76 | 25056983.8 | 1423321.1 |
| WAG + I + G4 | 701096.463 | 3419 | 1409030.93 | 24794990.9 | 1421860.97 |
| WAG + F + I + G4 | 701889.424 | 3438 | 1410654.85 | 25057218.8 | 1423556.19 |
| JTT + I + G4 | 710934.601 | 3419 | 1428707.2 | 24814667.2 | 1441537.25 |
| JTT + F + I + G4 | 710823.602 | 3438 | 1428523.2 | 25075087.2 | 1441424.55 |
| JTTDCMut + I + G4 | 710751.156 | 3419 | 1428340.31 | 24814300.3 | 1441170.36 |
| JTTDCMut + F + I + G4 | 710735.814 | 3438 | 1428347.63 | 25074911.6 | 1441248.97 |
| DCMut + I + G4 | 714711.037 | 3419 | 1436260.07 | 24822220.1 | 1449090.12 |
| DCMut + F + I + G4 | 711284.014 | 3438 | 1429444.03 | 25076008 | 1442345.37 |
| VT + I + G4 | 700737.235 | 3419 | 1408312.47 | 24794272.5 | 1421142.52 |
| VT + F + I + G4 | 701335.287 | 3438 | 1409546.58 | 25056110.6 | 1422447.92 |
| PMB + I + G4 | 702726.44 | 3419 | 1412290.88 | 24798250.9 | 1425120.93 |
| PMB + F + I + G4 | 702772.429 | 3438 | 1412420.86 | 25058984.9 | 1425322.2 |
| Blosum62 + I + G4 | 701617.707 | 3419 | 1410073.42 | 24796033.4 | 1422903.46 |
| Blosum62 + F + I + G4 | 702611.837 | 3438 | 1412099.67 | 25058663.7 | 1425001.02 |
| Dayhoff + I + G4 | 714770.68 | 3419 | 1436379.36 | 24822339.4 | 1449209.41 |
| Dayhoff + F + I + G4 | 711355.685 | 3438 | 1429587.37 | 25076151.4 | 1442488.72 |
| mtREV + I + G4 | 749028.617 | 3419 | 1504895.23 | 24890855.2 | 1517725.28 |
| mtREV + F + I + G4 | 720238.257 | 3438 | 1447352.51 | 25093916.5 | 1460253.86 |
| mtART + I + G4 | 761576.069 | 3419 | 1529990.14 | 24915950.1 | 1542820.18 |
| mtART + F + I + G4 | 728240.83 | 3438 | 1463357.66 | 25109921.7 | 1476259 |
| mtZOA + I + G4 | 739982.765 | 3419 | 1486803.53 | 24872763.5 | 1499633.58 |
| mtZOA + F + I + G4 | 718607.263 | 3438 | 1444090.53 | 25090654.5 | 1456991.87 |
| mtMet + I + G4 | 748088.976 | 3419 | 1503015.95 | 24888976 | 1515846 |
| mtMet + F + I + G4 | 719959.273 | 3438 | 1446794.55 | 25093358.5 | 1459695.89 |
| mtVer + I + G4 | 758904.234 | 3419 | 1524646.47 | 24910606.5 | 1537476.51 |
| mtVer + F + I + G4 | 735119.819 | 3438 | 1477115.64 | 25123679.6 | 1490016.98 |
| mtInv + I + G4 | 748323.791 | 3419 | 1503485.58 | 24889445.6 | 1516315.63 |
| mtInv + F + I + G4 | 713020.322 | 3438 | 1432916.64 | 25079480.6 | 1445817.99 |
| mtMAM + I + G4 | 772787.688 | 3419 | 1552413.38 | 24938373.4 | 1565243.42 |
| mtMAM + F + I + G4 | 742830.414 | 3438 | 1492536.83 | 25139100.8 | 1505438.17 |
| HIVb + I + G4 | 731661.086 | 3419 | 1470160.17 | 24856120.2 | 1482990.22 |
| HIVb + F + I + G4 | 733746.26 | 3438 | 1474368.52 | 25120932.5 | 1487269.86 |
| HIVw + I + G4 | 764429.124 | 3419 | 1535696.25 | 24921656.2 | 1548526.29 |
| HIVw + F + I + G4 | 755850.659 | 3438 | 1518577.32 | 25165141.3 | 1531478.66 |
| FLU + I + G4 | 726306.5 | 3419 | 1459451 | 24845411 | 1472281.05 |
| FLU + F + I + G4 | 726675.548 | 3438 | 1460227.1 | 25106791.1 | 1473128.44 |
| rtREV + I + G4 | 705812.59 | 3419 | 1418463.18 | 24804423.2 | 1431293.23 |
| rtREV + F + I + G4 | 703074.234 | 3438 | 1413024.47 | 25059588.5 | 1425925.81 |
| cpREV + I + G4 | 706531.046 | 3419 | 1419900.09 | 24805860.1 | 1432730.14 |
| cpREV + F + I + G4 | 711884.209 | 3438 | 1430644.42 | 25077208.4 | 1443545.76 |

TABLE 10C
RuvC_BH_HNH_No_IIB Domain
N sites 315
N proteins 1671

| Model | -LnL | df | AIC | AICc | BIC |
|---|---|---|---|---|---|
| LG | 710639.991 | 3339 | 1427957.98 | 23732478 | 1440487.82 |
| LG + I | 707348.838 | 3340 | 1421377.68 | 23739257.7 | 1433911.27 |
| LG + G4 | 682599.624 | 3340 | 1371879.25 | 23689759.2 | 1384412.84 |
| LG + I + G4 | 681961.367 | 3341 | 1370604.74 | 23701848.7 | 1383142.08 |
| LG + F + I + G4 | 683776.089 | 3360 | 1374272.18 | 23960192.2 | 1386880.82 |
| WAG + I + G4 | 683029.053 | 3341 | 1372740.11 | 23703984.1 | 1385277.45 |
| WAG + F + I + G4 | 683787.589 | 3360 | 1374295.18 | 23960215.2 | 1386903.82 |
| JTT + I + G4 | 692546.409 | 3341 | 1391774.82 | 23723018.8 | 1404312.16 |
| JTT + F + I + G4 | 692512.293 | 3360 | 1391744.59 | 23977664.6 | 1404353.23 |
| JTTDCMut + I + G4 | 692373.142 | 3341 | 1391428.28 | 23722672.3 | 1403965.63 |
| JTTDCMut + F + I + G4 | 692433.37 | 3360 | 1391586.74 | 23977506.7 | 1404195.38 |
| DCMut + I + G4 | 696327.276 | 3341 | 1399336.55 | 23730580.6 | 1411873.9 |
| DCMut + F + I + G4 | 692986.323 | 3360 | 1392692.65 | 23978612.6 | 1405301.29 |
| VT + I + G4 | 682678.293 | 3341 | 1372038.59 | 23703282.6 | 1384575.93 |
| VT + F + I + G4 | 683276.456 | 3360 | 1373272.91 | 23959192.9 | 1385881.56 |
| PMB + I + G4 | 684667.591 | 3341 | 1376017.18 | 23707261.2 | 1388554.53 |
| PMB + F + I + G4 | 684710.622 | 3360 | 1376141.24 | 23962061.2 | 1388749.89 |
| Blosum62 + I + G4 | 683517.3 | 3341 | 1373716.6 | 23704960.6 | 1386253.95 |
| Blosum62 + F + I + G4 | 684507.936 | 3360 | 1375735.87 | 23961655.9 | 1388344.52 |
| Dayhoff + I + G4 | 696385.628 | 3341 | 1399453.26 | 23730697.3 | 1411990.6 |
| Dayhoff + F + I + G4 | 693056.563 | 3360 | 1392833.13 | 23978753.1 | 1405441.77 |
| mtREV + I + G4 | 729901.526 | 3341 | 1466485.05 | 23797729.1 | 1479022.4 |
| mtREV + F + I + G4 | 701737.505 | 3360 | 1410195.01 | 23996115 | 1422803.65 |
| mtART + I + G4 | 742286.815 | 3341 | 1491255.63 | 23822499.6 | 1503792.98 |
| mtART + F + I + G4 | 709647.414 | 3360 | 1426014.83 | 24011934.8 | 1438623.47 |
| mtZOA + I + G4 | 721038.084 | 3341 | 1448758.17 | 23780002.2 | 1461295.51 |
| mtZOA + F + I + G4 | 700219.93 | 3360 | 1407159.86 | 23993079.9 | 1419768.5 |
| mtMet + I + G4 | 729039.574 | 3341 | 1464761.15 | 23796005.1 | 1477298.49 |
| mtMet + F + I + G4 | 701509.141 | 3360 | 1409738.28 | 23995658.3 | 1422346.93 |
| mtVer + I + G4 | 739625.403 | 3341 | 1485932.81 | 23817176.8 | 1498470.15 |
| mtVer + F + I + G4 | 716440.076 | 3360 | 1439600.15 | 24025520.2 | 1452208.8 |
| mtInv + I + G4 | 729219.014 | 3341 | 1465120.03 | 23796364 | 1477657.37 |
| mtInv + F + I + G4 | 694761.665 | 3360 | 1396243.33 | 23982163.3 | 1408851.97 |
| mtMAM + I + G4 | 753025.909 | 3341 | 1512733.82 | 23843977.8 | 1525271.16 |
| mtMAM + F + I + G4 | 723890.679 | 3360 | 1454501.36 | 24040421.4 | 1467110 |
| HIVb + I + G4 | 712957.289 | 3341 | 1432596.58 | 23763840.6 | 1445133.92 |
| HIVb + F + I + G4 | 715070.081 | 3360 | 1436860.16 | 24022780.2 | 1449468.81 |
| HIVw + I + G4 | 744863.94 | 3341 | 1496409.88 | 23827653.9 | 1508947.23 |
| HIVw + F + I + G4 | 736648.004 | 3360 | 1480016.01 | 24065936 | 1492624.65 |
| FLU + I + G4 | 707623.242 | 3341 | 1421928.49 | 23753172.5 | 1434465.83 |
| FLU + F + I + G4 | 708080.883 | 3360 | 1422881.77 | 24008801.8 | 1435490.41 |
| rtREV + I + G4 | 687596.012 | 3341 | 1381874.02 | 23713118 | 1394411.37 |
| rtREV + F + I + G4 | 684941.592 | 3360 | 1376603.18 | 23962523.2 | 1389211.83 |
| cpREV + I + G4 | 688288.268 | 3341 | 1383258.54 | 23714502.5 | 1395795.88 |
| cpREV + F + I + G4 | 693509.306 | 3360 | 1393738.61 | 23979658.6 | 1406347.26 |

TABLE 10D
RuvC_BH_HNH_IscB_Plus_early_Cas
N sites 315
N proteins 736

| Model | -LnL | df | AIC | AICc | BIC |
|---|---|---|---|---|---|
| LG | 268338.373 | 1469 | 539614.746 | 4858474.75 | 545127.276 |
| LG + I | 267002.735 | 1470 | 536945.47 | 4861685.47 | 542461.751 |
| LG + G4 | 257727.26 | 1470 | 518394.521 | 4843134.52 | 523910.803 |
| LG + I + G4 | 257519.901 | 1471 | 517981.802 | 4848605.8 | 523501.836 |
| LG + F + I + G4 | 258407.475 | 1490 | 519794.951 | 4962974.95 | 525386.284 |
| WAG + I + G4 | 257657.092 | 1471 | 518256.185 | 4848880.19 | 523776.219 |
| WAG + F + I + G4 | 258102.487 | 1490 | 519184.974 | 4962364.97 | 524776.307 |
| JTT + I + G4 | 261401.16 | 1471 | 525744.319 | 4856368.32 | 531264.353 |
| JTT + F + I + G4 | 261844.307 | 1490 | 526668.614 | 4969848.61 | 532259.948 |
| JTTDCMut + I + G4 | 261316.21 | 1471 | 525574.42 | 4856198.42 | 531094.454 |
| JTTDCMut + F + I + G4 | 261773.035 | 1490 | 526526.07 | 4969706.07 | 532117.403 |
| DCMut + I + G4 | 262678.146 | 1471 | 528298.293 | 4858922.29 | 533818.327 |
| DCMut + F + I + G4 | 261705.074 | 1490 | 526390.147 | 4969570.15 | 531981.48 |
| VT + I + G4 | 257755.118 | 1471 | 518452.237 | 4849076.24 | 523972.271 |
| VT + F + I + G4 | 258222.769 | 1490 | 519425.537 | 4962605.54 | 525016.871 |
| PMB + I + G4 | 258496.869 | 1471 | 519935.738 | 4850559.74 | 525455.773 |
| PMB + F + I + G4 | 258629.856 | 1490 | 520239.713 | 4963419.71 | 525831.046 |
| Blosum62 + I + G4 | 258168.988 | 1471 | 519279.977 | 4849903.98 | 524800.011 |
| Blosum62 + F + I + G4 | 258604.889 | 1490 | 520189.778 | 4963369.78 | 525781.111 |
| Dayhoff + I + G4 | 262698.376 | 1471 | 528338.752 | 4858962.75 | 533858.786 |
| Dayhoff + F + I + G4 | 261728.954 | 1490 | 526437.907 | 4969617.91 | 532029.24 |
| mtREV + I + G4 | 276586.333 | 1471 | 556114.665 | 4886738.67 | 561634.7 |
| mtREV + F + I + G4 | 265541.934 | 1490 | 534063.868 | 4977243.87 | 539655.201 |
| mtART + I + G4 | 282239.447 | 1471 | 567420.895 | 4898044.9 | 572940.929 |
| mtART + F + I + G4 | 269280.548 | 1490 | 541541.095 | 4984721.1 | 547132.429 |
| mtZOA + I + G4 | 273850.752 | 1471 | 550643.504 | 4881267.5 | 556163.539 |
| mtZOA + F + I + G4 | 265474.249 | 1490 | 533928.499 | 4977108.5 | 539519.832 |
| mtMet + I + G4 | 277072.239 | 1471 | 557086.478 | 4887710.48 | 562606.512 |
| mtMet + F + I + G4 | 265967.258 | 1490 | 534914.516 | 4978094.52 | 540505.849 |
| mtVer + I + G4 | 280924.716 | 1471 | 564791.432 | 4895415.43 | 570311.466 |
| mtVer + F + I + G4 | 271340.385 | 1490 | 545660.77 | 4988840.77 | 551252.103 |
| mtInv + I + G4 | 277013.161 | 1471 | 556968.322 | 4887592.32 | 562488.357 |
| mtInv + F + I + G4 | 263129.733 | 1490 | 529239.466 | 4972419.47 | 534830.799 |
| mtMAM + I + G4 | 286245.798 | 1471 | 575433.597 | 4906057.6 | 580953.631 |
| mtMAM + F + I + G4 | 274328.526 | 1490 | 551637.051 | 4994817.05 | 557228.385 |
| HIVb + I + G4 | 269657.388 | 1471 | 542256.775 | 4872880.78 | 547776.81 |
| HIVb + F + I + G4 | 270846.891 | 1490 | 544673.782 | 4987853.78 | 550265.115 |
| HIVw + I + G4 | 281628.722 | 1471 | 566199.444 | 4896823.44 | 571719.478 |
| HIVw + F + I + G4 | 278988.827 | 1490 | 560957.654 | 5004137.65 | 566548.987 |
| FLU + I + G4 | 267371.953 | 1471 | 537685.905 | 4868309.91 | 543205.94 |
| FLU + F + I + G4 | 267438.659 | 1490 | 537857.319 | 4981037.32 | 543448.652 |
| rtREV + I + G4 | 259334.306 | 1471 | 521610.613 | 4852234.61 | 527130.647 |
| rtREV + F + I + G4 | 258979.685 | 1490 | 520939.371 | 4964119.37 | 526530.704 |
| cpREV + I + G4 | 260311.41 | 1471 | 523564.819 | 4854188.82 | 529084.853 |
| cpREV + F + I + G4 | 261757.896 | 1490 | 526495.792 | 4969675.79 | 532087.125 |

TABLE 10E
Early Cas9 Amino Acid
N sites 1048
N proteins 128

| Model | -LnL | df | AIC | AICc | BIC |
|---|---|---|---|---|---|
| LG | 158546.793 | 253 | 317599.586 | 317761.456 | 318853.11 |
| LG + I | 158165.737 | 254 | 316839.474 | 317002.828 | 318097.952 |
| LG + G4 | 153534.28 | 254 | 307576.559 | 307739.914 | 308835.037 |
| LG + I + G4 | 153450.975 | 255 | 307411.95 | 307576.798 | 308675.383 |
| LG + F + I + G4 | 153344.18 | 274 | 307236.361 | 307431.316 | 308593.932 |
| WAG + I + G4 | 153438.079 | 255 | 307386.158 | 307551.006 | 308649.59 |
| WAG + F + I + G4 | 153281.497 | 274 | 307110.994 | 307305.949 | 308468.565 |
| JTT + I + G4 | 154955.321 | 255 | 310420.642 | 310585.491 | 311684.075 |
| JTT + F + I + G4 | 154753.553 | 274 | 310055.105 | 310250.06 | 311412.676 |
| JTTDCMut + I + G4 | 154922.992 | 255 | 310355.983 | 310520.832 | 311619.416 |
| JTTDCMut + F + I + G4 | 154725.109 | 274 | 309998.219 | 310193.173 | 311355.79 |
| DCMut + I + G4 | 155870.3 | 255 | 312250.6 | 312415.448 | 313514.032 |
| DCMut + F + I + G4 | 155113.884 | 274 | 310775.767 | 310970.722 | 312133.338 |
| VT + I + G4 | 153592.848 | 255 | 307695.696 | 307860.544 | 308959.128 |
| VT + F + I + G4 | 153448.997 | 274 | 307445.995 | 307640.95 | 308803.566 |
| PMB + I + G4 | 154434.683 | 255 | 309379.365 | 309544.214 | 310642.798 |
| PMB + F + I + G4 | 154055.781 | 274 | 308659.563 | 308854.517 | 310017.134 |
| Blosum62 + I + G4 | 154250.423 | 255 | 309010.846 | 309175.695 | 310274.279 |
| Blosum62 + F + I + G4 | 153937.508 | 274 | 308423.015 | 308617.97 | 309780.586 |
| Dayhoff + I + G4 | 155873.824 | 255 | 312257.649 | 312422.497 | 313521.082 |
| Dayhoff + F + I + G4 | 155119.656 | 274 | 310787.312 | 310982.267 | 312144.883 |
| mtREV + I + G4 | 165269.973 | 255 | 331049.945 | 331214.794 | 332313.378 |
| mtREV + F + I + G4 | 157064.584 | 274 | 314677.168 | 314872.123 | 316034.739 |
| mtART + I + G4 | 169405.3 | 255 | 339320.601 | 339485.449 | 340584.034 |
| mtART + F + I + G4 | 159787.176 | 274 | 320122.351 | 320317.306 | 321479.923 |
| mtZOA + I + G4 | 163921.253 | 255 | 328352.507 | 328517.355 | 329615.94 |
| mtZOA + F + I + G4 | 157454.96 | 274 | 315457.92 | 315652.874 | 316815.491 |
| mtMet + I + G4 | 166109.582 | 255 | 332729.164 | 332894.013 | 333992.597 |
| mtMet + F + I + G4 | 157397.596 | 274 | 315343.191 | 315538.146 | 316700.762 |
| mtVer + I + G4 | 167284.318 | 255 | 335078.637 | 335243.485 | 336342.07 |
| mtVer + F + I + G4 | 159774.207 | 274 | 320096.413 | 320291.368 | 321453.984 |
| mtInv + I + G4 | 166773.594 | 255 | 334057.187 | 334222.036 | 335320.62 |
| mtInv + F + I + G4 | 156166.225 | 274 | 312880.451 | 313075.405 | 314238.022 |
| mtMAM + I + G4 | 170224.016 | 255 | 340958.033 | 341122.881 | 342221.466 |
| mtMAM + F + I + G4 | 161394.78 | 274 | 323337.56 | 323532.515 | 324695.131 |
| HIVb + I + G4 | 158770.796 | 255 | 318051.592 | 318216.441 | 319315.025 |
| HIVb + F + I + G4 | 158521.047 | 274 | 317590.094 | 317785.049 | 318947.665 |
| HIVw + I + G4 | 165646.002 | 255 | 331802.005 | 331966.853 | 333065.438 |
| HIVw + F + I + G4 | 162883.131 | 274 | 326314.262 | 326509.217 | 327671.833 |
| FLU + I + G4 | 158550.963 | 255 | 317611.926 | 317776.774 | 318875.359 |
| FLU + F + I + G4 | 157457.023 | 274 | 315462.047 | 315657.001 | 316819.618 |
| rtREV + I + G4 | 154713.716 | 255 | 309937.431 | 310102.28 | 311200.864 |
| rtREV + F + I + G4 | 153762.52 | 274 | 308073.04 | 308267.995 | 309430.611 |
| cpREV + I + G4 | 154803.199 | 255 | 310116.399 | 310281.247 | 311379.832 |
| cpREV + F + I + G4 | 154747.45 | 274 | 310042.901 | 310237.855 | 311400.472 |

TABLE 10F
Early Cas9 DNA
N sites 3039
N proteins 128

| | | | | | |
|---|---|---|---|---|---|
| GTR + F | 292394.76 | 261 | 585311.52 | 585360.769 | 586882.553 |
| GTR + F + I | 291454.796 | 262 | 583433.591 | 583483.235 | 585010.644 |
| GTR + F + G4 | 279093.787 | 262 | 558711.574 | 558761.218 | 560288.626 |
| GTR + F + I + G4 | 278956.868 | 263 | 558439.736 | 558489.777 | 560022.808 |
| SYM + I + G4 | 279352.506 | 260 | 559225.011 | 559273.867 | 560790.025 |
| TVM + F + I + G4 | 278968.492 | 262 | 558460.983 | 558510.627 | 560038.036 |
| TVMe + I + G4 | 279407.399 | 259 | 559332.797 | 559381.261 | 560891.792 |
| TIM3 + F + I + G4 | 279049.294 | 261 | 558620.588 | 558669.837 | 560191.621 |
| TIM3e + I + G4 | 279401.196 | 258 | 559318.391 | 559366.465 | 560871.367 |
| TIM2 + F + I + G4 | 279352.841 | 261 | 559227.682 | 559276.931 | 560798.715 |
| TIM2e + I + G4 | 280434.163 | 258 | 561384.325 | 561432.399 | 562937.3 |
| TIM + F + I + G4 | 279440.534 | 261 | 559403.068 | 559452.317 | 560974.101 |
| TIMe + I + G4 | 280499.184 | 258 | 561514.369 | 561562.442 | 563067.344 |
| TPM3u + F + I + G4 | 279064.274 | 260 | 558648.548 | 558697.403 | 560213.562 |
| TPM3 + F + I + G4 | 279064.274 | 260 | 558648.548 | 558697.403 | 560213.562 |
| TPM2u + F + I + G4 | 279363.223 | 260 | 559246.446 | 559295.301 | 560811.459 |
| TPM2 + F + I + G4 | 279362.542 | 260 | 559245.084 | 559293.939 | 560810.097 |
| K3Pu + F + I + G4 | 279454.965 | 260 | 559429.93 | 559478.785 | 560994.943 |
| K3P + I + G4 | 280559.351 | 257 | 561632.702 | 561680.387 | 563179.657 |
| TN + F + I + G4 | 279455.636 | 260 | 559431.272 | 559480.128 | 560996.286 |
| TNe + I + G4 | 280496.481 | 257 | 561506.961 | 561554.646 | 563053.917 |
| HKY + F + I + G4 | 279465.418 | 259 | 559448.837 | 559497.3 | 561007.831 |
| K2P + I + G4 | 280565.775 | 256 | 561643.549 | 561690.848 | 563184.486 |
| F81 + F + I + G4 | 281411.443 | 258 | 563338.885 | 563386.958 | 564891.86 |
| JC + I + G4 | 282299.492 | 255 | 565108.984 | 565155.897 | 566643.901 |

TABLE 10G
Omega RNA.
N sites 522
NRNAS 711

| Model | -LnL | df | AIC | AICc | BIC |
|---|---|---|---|---|---|
| GTR + F | 137969.864 | 1427 | 278793.729 | 4354305.73 | 284869.42 |
| GTR + F + ASC | 137969.861 | 1427 | 278793.721 | 4354305.72 | 284869.413 |
| GTR + F + G4 | 132814.717 | 1428 | 268485.434 | 4349709.43 | 274565.383 |
| GTR + F + ASC + G4 | 132814.709 | 1428 | 268485.418 | 4349709.42 | 274565.367 |
| SYM + G4 | 132847.753 | 1425 | 268545.507 | 4332645.51 | 274612.683 |
| SYM + ASC + G4 | 132847.753 | 1425 | 268545.507 | 4332645.51 | 274612.683 |
| TVM + F + G4 | 132918.625 | 1427 | 268691.251 | 4344203.25 | 274766.942 |
| TVM + F + ASC + G4 | 132918.625 | 1427 | 268691.251 | 4344203.25 | 274766.942 |
| TVMe + G4 | 132862.651 | 1424 | 268573.302 | 4326973.3 | 274636.22 |
| TVMe + ASC + G4 | 132862.651 | 1424 | 268573.302 | 4326973.3 | 274636.22 |
| TIM3 + F + G4 | 132865.718 | 1426 | 268583.436 | 4338387.44 | 274654.87 |
| TIM3 + F + ASC + G4 | 132865.718 | 1426 | 268583.436 | 4338387.44 | 274654.87 |
| TIM3e + G4 | 132931.537 | 1423 | 268709.074 | 4321413.07 | 274767.735 |
| TIM3e + ASC + G4 | 132931.537 | 1423 | 268709.074 | 4321413.07 | 274767.735 |
| TIM2 + F + G4 | 132882.127 | 1426 | 268616.255 | 4338420.26 | 274687.689 |
| TIM2 + F + ASC + G4 | 132882.127 | 1426 | 268616.255 | 4338420.26 | 274687.689 |
| TIM2e + G4 | 132910.507 | 1423 | 268667.013 | 4321371.01 | 274725.674 |
| TIM2e + ASC + G4 | 132910.507 | 1423 | 268667.013 | 4321371.01 | 274725.674 |
| TIM + F + G4 | 132882.794 | 1426 | 268617.588 | 4338421.59 | 274689.022 |
| TIM + F + ASC + G4 | 132882.794 | 1426 | 268617.588 | 4338421.59 | 274689.022 |
| TIMe + G4 | 132943.006 | 1423 | 268732.012 | 4321436.01 | 274790.673 |
| TIMe + ASC + G4 | 132943.006 | 1423 | 268732.012 | 4321436.01 | 274790.673 |
| TPM3u + F + G4 | 132975.699 | 1425 | 268801.399 | 4332901.4 | 274868.575 |
| TPM3u + F + ASC + G4 | 132975.699 | 1425 | 268801.399 | 4332901.4 | 274868.575 |
| TPM3 + F + G4 | 132975.699 | 1425 | 268801.399 | 4332901.4 | 274868.575 |
| TPM3 + F + ASC + G4 | 132975.699 | 1425 | 268801.399 | 4332901.4 | 274868.575 |
| TPM2u + F + G4 | 132989.627 | 1425 | 268829.254 | 4332929.25 | 274896.43 |
| TPM2u + F + ASC + G4 | 132989.627 | 1425 | 268829.254 | 4332929.25 | 274896.43 |
| TPM2 + F + G4 | 132989.627 | 1425 | 268829.254 | 4332929.25 | 274896.43 |
| TPM2 + F + ASC + G4 | 132989.627 | 1425 | 268829.254 | 4332929.25 | 274896.43 |
| K3Pu + F + G4 | 132994.102 | 1425 | 268838.203 | 4332938.2 | 274905.379 |
| K3Pu + F + ASC + G4 | 132994.102 | 1425 | 268838.203 | 4332938.2 | 274905.379 |
| K3P + G4 | 132958.903 | 1422 | 268761.806 | 4315773.81 | 274816.21 |
| K3P + ASC + G4 | 132958.903 | 1422 | 268761.806 | 4315773.81 | 274816.21 |
| TN + F + G4 | 132909.484 | 1425 | 268668.968 | 4332768.97 | 274736.145 |
| TN + F + ASC + G4 | 132909.484 | 1425 | 268668.968 | 4332768.97 | 274736.145 |
| TNe + G4 | 132969.855 | 1422 | 268783.709 | 4315795.71 | 274838.113 |
| TNe + ASC + G4 | 132969.857 | 1422 | 268783.714 | 4315795.71 | 274838.117 |
| HKY + F + G4 | 133021.421 | 1424 | 268890.843 | 4327290.84 | 274953.761 |
| HKY + F + ASC + G4 | 133021.421 | 1424 | 268890.843 | 4327290.84 | 274953.761 |
| K2P + G4 | 132985.807 | 1421 | 268813.613 | 4310137.61 | 274863.759 |
| K2P + ASC + G4 | 132985.807 | 1421 | 268813.613 | 4310137.61 | 274863.759 |
| F81 + F + G4 | 135134.431 | 1423 | 273114.861 | 4325818.86 | 279173.522 |
| F81 + F + ASC + G4 | 135134.431 | 1423 | 273114.861 | 4325818.86 | 279173.522 |
| JC + G4 | 135161.994 | 1420 | 273163.988 | 4308803.99 | 279209.876 |
| JC + ASC + G4 | 135161.994 | 1420 | 273163.988 | 4308803.99 | 279209.876 |

TABLE 10H
PLMP Domain
N sites 49
N proteins 2050

| Model | -LnL | df | AIC | AICc | BIC |
|---|---|---|---|---|---|
| LG | 122204.458 | 4071 | 252550.916 | 33406774.9 | 260252.517 |
| LG + G4 | 118284.816 | 4072 | 244713.633 | 33415225.6 | 252417.125 |
| LG + F + G4 | 118726.584 | 4091 | 245635.168 | 33726379.2 | 253374.605 |
| WAG + G4 | 118217.215 | 4072 | 244578.43 | 33415090.4 | 252281.922 |
| WAG + F + G4 | 118513.55 | 4091 | 245209.1 | 33725953.1 | 252948.536 |
| JTT + G4 | 119140.743 | 4072 | 246425.487 | 33416937.5 | 254128.979 |
| JTT + F + G4 | 119731.465 | 4091 | 247644.929 | 33728388.9 | 255384.366 |
| JTTDCMut + G4 | 119116.725 | 4072 | 246377.451 | 33416889.5 | 254080.943 |
| JTTDCMut + F + G4 | 119688.426 | 4091 | 247558.851 | 33728302.9 | 255298.288 |
| DCMut + G4 | 120403.011 | 4072 | 248950.023 | 33419462 | 256653.515 |
| DCMut + F + G4 | 120243.902 | 4091 | 248669.803 | 33729413.8 | 256409.24 |
| VT + G4 | 117974.209 | 4072 | 244092.419 | 33414604.4 | 251795.911 |
| VT + F + G4 | 118386.151 | 4091 | 244954.302 | 33725698.3 | 252693.739 |
| PMB + G4 | 118297.184 | 4072 | 244738.368 | 33415250.4 | 252441.86 |
| PMB + F + G4 | 118922.423 | 4091 | 246026.846 | 33726770.8 | 253766.283 |
| Blosum62 + G4 | 118283.672 | 4072 | 244711.344 | 33415223.3 | 252414.836 |
| Blosum62 + F + G4 | 118856.612 | 4091 | 245895.224 | 33726639.2 | 253634.661 |
| Dayhoff + G4 | 120429.145 | 4072 | 249002.29 | 33419514.3 | 256705.782 |
| Dayhoff + F + G4 | 120262.14 | 4091 | 248706.279 | 33729450.3 | 256445.716 |
| mtREV + G4 | 127008.803 | 4072 | 262161.606 | 33432673.6 | 269865.098 |
| mtREV + F + G4 | 121622.94 | 4091 | 251427.88 | 33732171.9 | 259167.317 |
| mtART + G4 | 130752.472 | 4072 | 269648.944 | 33440160.9 | 277352.436 |
| mtART + F + G4 | 124656.265 | 4091 | 257494.53 | 33738238.5 | 265233.967 |
| mtZOA + G4 | 126309.547 | 4072 | 260763.094 | 33431275.1 | 268466.586 |
| mtZOA + F + G4 | 122039.936 | 4091 | 252261.873 | 33733005.9 | 260001.31 |
| mtMet + G4 | 127023.696 | 4072 | 262191.392 | 33432703.4 | 269894.884 |
| mtMet + F + G4 | 121736.553 | 4091 | 251655.106 | 33732399.1 | 259394.542 |
| mtVer + G4 | 129268.339 | 4072 | 266680.678 | 33437192.7 | 274384.171 |
| mtVer + F + G4 | 124100.301 | 4091 | 256382.601 | 33737126.6 | 264122.038 |
| mtInv + G4 | 126775.212 | 4072 | 261694.425 | 33432206.4 | 269397.917 |
| mtInv + F + G4 | 120370.355 | 4091 | 248922.709 | 33729666.7 | 256662.146 |
| mtMAM + G4 | 131950.378 | 4072 | 272044.757 | 33442556.8 | 279748.249 |
| mtMAM + F + G4 | 126196.539 | 4091 | 260575.079 | 33741319.1 | 268314.515 |
| HIVb + G4 | 122513.558 | 4072 | 253171.116 | 33423683.1 | 260874.608 |
| HIVb + F + G4 | 123247.507 | 4091 | 254677.014 | 33735421 | 262416.451 |
| HIVw + G4 | 127543.628 | 4072 | 263231.256 | 33433743.3 | 270934.749 |
| HIVw + F + G4 | 126951.314 | 4091 | 262084.629 | 33742828.6 | 269824.066 |
| FLU + G4 | 122300.586 | 4072 | 252745.171 | 33423257.2 | 260448.663 |
| FLU + F + G4 | 123081.967 | 4091 | 254345.934 | 33735089.9 | 262085.371 |
| rtREV + G4 | 119057.976 | 4072 | 246259.953 | 33416772 | 253963.445 |
| rtREV + F + G4 | 119052.974 | 4091 | 246287.948 | 33727031.9 | 254027.385 |
| cpREV + G4 | 119089.943 | 4072 | 246323.886 | 33416835.9 | 254027.378 |
| cpREV + F + G4 | 119416.158 | 4091 | 247014.317 | 33727758.3 | 254753.754 |

### IS200/IS605 Elements Encode Diverse RNA-Guided Nucleases

[1055] In addition to the distinct succession of evolutionary events that yielded the abundant and diverse type II CRISPR systems, our phylogenetic analysis revealed several other events in the evolution of IscB and related proteins that led to the extant diversity, which Applicants sought to experimentally explore.

[1056] First, Applicants searched for IscB homologs in eukaryotic genomes and identified multiple iscB loci in the chloroplast genome of Ignatius tetrasporus UTEX B 2012, a terrestrial green alga (FIG. 39A-B, FIG. 59). Although the ORF is disrupted by multiple stop codons in most of these loci, one locus encodes an intact IscB (˜50% aa identity to related prokaryotic IscBs) and a transcriptionally active ωRNA (FIG. 39C). This eukaryotic IscB cleaves DNA with a minimal NNG TAM (FIG. 39D), which differs from other characterized IscB TAMs (FIG. 48).

[1057] Second, Applicant investigated the clade of large IscBs, which contain a BH domain that is split in two by REC domain-like insertions (white squares, FIGS. 31A, 39A). Applicants hypothesized that these insertions might enhance DNA unwinding, similarly to the REC lobe of Cas9 (Nishimisu, H. et al. (2014), Cell. 156, 935-949) and would therefore facilitate genome editing in the complex landscape of eukaryotic chromatin structure. Applicants screened 6 large IscB proteins, using a pool of 12 guides each, for their ability to generate insertions/deletions (indels) in HEK293FT cells (see Methods, Table 11); one (OgeuIscB) produced appreciable indels (FIG. 39E-F, FIG. 40A). To further examine OgeuIscB activity, Applicants tested a range of guide lengths targeting 3 loci in the human genome and found that OgeuIscB achieved the maximum indel rate with a 16 nt guide (FIG. 40B). On a panel of 46 sites in the human genome, Applicants found that OgeuIscB induced indels at 28 of these sites with varying efficiency up to 4.4% (FIG. 39G, FIG. 40C, Table 11). Thus, OgeuIscB seems a promising candidate for further development of IscB-based genome editing tools.

[1058] Third, Applicants experimentally characterized the putative nuclease activity of IsrB, the apparent ancestor of IscB (FIG. 39A). K. racemifer contains 5 isrBs associated with ωRNAs that are natively expressed (FIG. 39H, FIG. 41). Applicants found that the IsrB-ωRNA RNP nicks the non-target strand of a dsDNA substrate in a guide- and TAM-specific manner (FIG. 39I-J, FIG. 42), which is analogous to the activity of IscB upon inactivation of the HNH domain (FIG. 15F).

[1059] Finally, Applicants sought to determine if IS200/605 transposons in general harbor RNA-guided nucleases. In addition to the distinct IscB and IsrB families, most IS200/IS605 transposons encode RuvC-like endonucleases of another family, TnpB, which is thought to be the ancestor of Cas12s, the type V CRISPR effectors (FIG. 39A) (Shmakov, S. et al. (2017), Nat. Rev. Microbiol. 15, 169-182). Additionally, TnpB is the likely ancestor of larger proteins, Fanzors, encoded in diverse eukaryotic transposons (FIG. 39A) (Bao, W. et al (2013), Mob. DNA 4, 12). The TnpB family, including Fanzor, is an order of magnitude more diverse than the IscB family; an HMMER search identified more than a million tnpB loci in publicly available prokaryotic genomes.

[1060] Applicants identified conserved non-coding regions immediately downstream of the CDS of many tnpBs, suggesting the presence of associated ncRNAs that could function as RNA guides (FIG. 60). Previous work has identified ncRNAs overlapping the 3′-end of tnpB genes in archaea and bacteria (Gomes-Filho, J. et al. (2015), RNA Biol. 12, 490-500; Weinberg, Z., et al. (2017), Nucleic Acids Res. 45, 10811-10823), but the function of these ncRNAs has not been characterized. Small RNA-seq of K. racemifer revealed native expression of a ncRNA overlapping the 3′ end of the associated tnpB ORF (FIG. 39K), which Applicants classified as a distinct group of ωRNAs. The reverse complement of the KraTnpB ωRNA 3′ end is nearly identical to the 5′ of the ωRNA associated with some KraIscBs, a region that corresponds to the predicted transposon end in each locus.

[1061] Analysis of non-redundant loci containing tnpB genes that clustered with KraTnpB showed a drop of sequence conservation at the 3′ end of the loci (FIG. 60), corresponding to the IS200/605 transposon end. Comparison to the small RNA-seq trace revealed expression beyond the conservation drop, indicating possible presence of a guide sequence in the transcript (FIG. 39M). In vitro plasmid cleavage assays for multiple TnpB proteins from this cluster using a reprogrammed guide demonstrated RNA-guided cleavage with a 5′ TAM (FIG. 39N, FIG. 61). Applicants recombinantly purified a TnpB from Alicyclobacillus macrosporangiidus (AmaTnpB) and confirmed its reprogrammable RNA-guided dsDNA endonuclease activity (FIG. 39O, FIG. 61). Applicants also observed that AmaTnpB robustly cleaved target-containing ssDNA substrates (FIG. 39P) and non-specifically cleaved a collateral substrate upon recognition of dsDNA or ssDNA substrates (FIG. 39Q). Sequences corresponding to the 12-guide pooled experiments for OgeuIscB, OwzoIscB, OiziIscB, OwflIscB, UpfjIscB, and UwstIscB guides targeting human EMX1, DNMT1, VEGFA and FANCF genes in Table 11 are provided as SEQ ID NOs: 2551-2574 in the Sequence Listing.

### Tables 11A-D. Guide Sequences and Statistical Analysis Relating to Mammalian Genome Editing Experiments

TABLE 11A
Guides and statistical analysis pertaining to FIG. 40.

| | | | | | | p value |
|---|---|---|---|---|---|---|
| | | | | | | (2-tailed |
| Guide | Sequence | Rep 1 | Rep 2 | Rep 3 | Rep 4 | T test) |
| DNMT1 12 | gAACATA | 0.001906505 | 0 | 0.009962144 | 0.014548629 | 0.723631176 |
| bp | TGAGTG | | | | | |
| | (SEQ | | | | | |
| | ID | | | | | |
| | NO: | | | | | |
| | 2065) | | | | | |
| DNMT1 14 | gTTAACA | 0.077547934 | 0.067019273 | 0.084919567 | 0.060092543 | 5.29219E−05 |
| bp | TATGAG | | | | | |
| | TG | | | | | |
| | (SEQ | | | | | |
| | ID | | | | | |
| | NO: | | | | | |
| | 2066) | | | | | |
| DNMT1 16 | gGTTTAA | 0.458614455 | 0.437795105 | 0.497773537 | 0.456562279 | 3.72633E−08 |
| bp | CATATG | | | | | |
| | AGTG | | | | | |
| | (SEQ | | | | | |
| | ID | | | | | |
| | NO: | | | | | |
| | 2067) | | | | | |
| DNMT1 18 | gAAGTTT | 0.098899209 | 0.065241889 | 0.047588542 | 0.057594754 | 0.001774195 |
| bp | AACATA | | | | | |
| | TGAGTG | | | | | |
| | (SEQ | | | | | |
| | ID | | | | | |
| | NO: | | | | | |
| | 2068) | | | | | |
| DNMT1 20 | gACAAGT | 0.030587276 | 0.029461899 | 0.031764077 | 0.062483728 | 0.008582107 |
| bp | TTAACA | | | | | |
| | TATGAG | | | | | |
| | TG | | | | | |
| | (SEQ | | | | | |
| | ID | | | | | |
| | NO: | | | | | |
| | 2069) | | | | | |
| DNMT1 22 | gAAACAA | 0.043732575 | 0.03300502 | 0.046676261 | 0.007673861 | 0.02686037 |
| bp | GTTTAA | | | | | |
| | CATATG | | | | | |
| | AGTG | | | | | |
| | (SEQ | | | | | |
| | ID | | | | | |
| | NO: | | | | | |
| | 2070) | | | | | |
| DNMT1 24 | gACAAAC | 0.013979822 | 0.01884336 | 0.009703792 | 0.038013616 | 0.078758296 |
| bp | AAGTTT | | | | | |
| | AACATA | | | | | |
| | TGAGTG | | | | | |
| | (SEQ | | | | | |
| | ID | | | | | |
| | NO: | | | | | |
| | 2071) | | | | | |
| DNMT1 26 | gACACAA | 0.027471899 | 0.011556304 | 0.018715493 | 0.015009256 | 0.037924487 |
| bp | ACAAGT | | | | | |
| | TTAACA | | | | | |
| | TATGAG | | | | | |
| | TG (SEQ | | | | | |
| | ID | | | | | |
| | NO: | | | | | |
| | 2072) | | | | | |
| Non- | gATGTCT | 0 | 0.003144011 | 0 | 0.015752063 | |
| targeting | TCCTGG | | | | | |
| | GACGAA | | | | | |
| | GACAA | | | | | |
| | (SEQ | | | | | |
| | ID | | | | | |
| | NO: | | | | | |
| | 2073) | | | | | |
| TTLL11 12 | gTAGGCA | 0 | 0 | 0.012709306 | 0.008514503 | 0.146337514 |
| bp | TATGTC | | | | | |
| | (SEQ | | | | | |
| | ID | | | | | |
| | NO: | | | | | |
| | 2074) | | | | | |
| TTLL11 14 | gTCTAGG | 0.627943485 | 0.785402618 | 0.633681552 | 0.611796195 | 3.25846E−06 |
| bp | CATATG | | | | | |
| | TC (SEQ | | | | | |
| | ID | | | | | |
| | NO: | | | | | |
| | 2075) | | | | | |
| TTLL11 16 | gATTCTA | 0.746360468 | 0.772388627 | 0.60119664 | 0.606760197 | 5.34844E−06 |
| bp | GGCATA | | | | | |
| | TGTC | | | | | |
| | (SEQ | | | | | |
| | ID | | | | | |
| | NO: | | | | | |
| | 2076) | | | | | |
| TTLL11 18 | gAAATTC | 0.590834854 | 0.38052957 | 0.391436718 | 0.37120723 | 0.000172577 |
| bp | TAGGCA | | | | | |
| | TATGTC | | | | | |
| | (SEQ | | | | | |
| | ID | | | | | |
| | NO: | | | | | |
| | 2077) | | | | | |
| TTLL11 20 | gCAAAAT | 0.473175608 | 0.37771732 | 0.258312202 | 0.284159823 | 0.000384218 |
| bp | TCTAGG | | | | | |
| | CATATG | | | | | |
| | TC | | | | | |
| | (SEQ | | | | | |
| | ID | | | | | |
| | NO: | | | | | |
| | 2078) | | | | | |
| TTLL11 22 | gACCAAA | 0.503107428 | 0.475723677 | 0.534404067 | 0.594416729 | 8.35011E−07 |
| bp | ATTCTA | | | | | |
| | GGCATA | | | | | |
| | TGTC | | | | | |
| | (SEQ | | | | | |
| | ID | | | | | |
| | NO: | | | | | |
| | 2079) | | | | | |
| TTLL 11 24 | gGCACCA | 0.664339872 | 0.535442787 | 0.521896007 | 0.565888659 | 2.03162E−06 |
| bp | AAATTC | | | | | |
| | TAGGCA | | | | | |
| | TATGTC | | | | | |
| | (SEQ | | | | | |
| | ID | | | | | |
| | NO: | | | | | |
| | 2080) | | | | | |
| TTLL11 26 | gAAGCAC | 0.482984511 | 0.397657213 | 0.441831108 | 0.521148952 | 2.35984E−06 |
| bp | CAAAAT | | | | | |
| | TCTAGG | | | | | |
| | CATATG | | | | | |
| | TC | | | | | |
| | (SEQ | | | | | |
| | ID | | | | | |
| | NO: | | | | | |
| | 2081) | | | | | |
| Non- | gATGTCT | 0 | 0 | 0 | 0 | |
| targeting | TCCTGG | | | | | |
| | GACGAA | | | | | |
| | GACAA | | | | | |
| | (SEQ | | | | | |
| | ID | | | | | |
| | NO: | | | | | |
| | 2082) | | | | | |
| VEGFA 12 | gGAGTGA | 0.020806087 | 0.010516629 | 0.005556482 | 0.027097648 | 0.01682896 |
| bp | ACGAGA | | | | | |
| | (SEQ | | | | | |
| | ID | | | | | |
| | NO: | | | | | |
| | 2083) | | | | | |
| VEGFA 14 | gAAGAGT | 3.750390016 | 5.007405318 | 4.862240882 | 4.29670913 | 4.40473E−06 |
| bp | GAACGA | | | | | |
| | GA | | | | | |
| | (SEQ | | | | | |
| | ID | | | | | |
| | NO: | | | | | |
| | 2084) | | | | | |
| VEGFA 16 | gAAAAGA | 3.937613652 | 5.037626945 | 4.71507566 | 4.029523838 | 3.03492E−06 |
| bp | GTGAAC | | | | | |
| | GAGA | | | | | |
| | (SEQ | | | | | |
| | ID | | | | | |
| | NO: | | | | | |
| | 2085) | | | | | |
| VEGFA 18 | gCAAAAA | 3.013126492 | 4.913294798 | 4.708655706 | 4.563681991 | 6.17349E−05 |
| bp | GAGTGA | | | | | |
| | ACGAGA | | | | | |
| | (SEQ | | | | | |
| | ID | | | | | |
| | NO: | | | | | |
| | 2086) | | | | | |
| VEGFA 20 | gATCAAA | 2.61686747 | 3.960702406 | 4.613233924 | 3.3221303 | 0.000147162 |
| bp | AAGAGT | | | | | |
| | GAACGA | | | | | |
| | GA | | | | | |
| | (SEQ | | | | | |
| | ID | | | | | |
| | NO: | | | | | |
| | 2087) | | | | | |
| VEGFA 22 | gTCATCA | 3.347833504 | 5.021651323 | 4.349930621 | 4.429301533 | 1.71866E−05 |
| bp | AAAAGA | | | | | |
| | GTGAAC | | | | | |
| | GAGA | | | | | |
| | (SEQ | | | | | |
| | ID | | | | | |
| | NO: | | | | | |
| | 2088) | | | | | |
| VEGFA 24 | gCATCAT | 2.717800404 | 3.867531264 | 4.314221941 | 3.037901182 | 7.8654E−05 |
| bp | CAAAAA | | | | | |
| | GAGTGA | | | | | |
| | ACGAGA | | | | | |
| | (SEQ | | | | | |
| | ID | | | | | |
| | NO: | | | | | |
| | 2089) | | | | | |
| VEGFA 26 | gAGCATC | 2.229058873 | 3.562953421 | 3.555705185 | 2.759688398 | 8.82134E−05 |
| bp | ATCAAA | | | | | |
| | AAGAGT | | | | | |
| | GAACGA | | | | | |
| | GA (SEQ | | | | | |
| | ID | | | | | |
| | NO: | | | | | |
| | 2090) | | | | | |
| Non- | gATGTCT | 0 | 0 | 0 | 0 | |
| targeting | TCCTGG | | | | | |
| | GACGAA | | | | | |
| | GACAA | | | | | |
| | (SEQ | | | | | |
| | ID | | | | | |
| | NO: | | | | | |
| | 2091) | | | | | |

TABLE 11B
Guides and statistical analysis pertaining to FIG. 39.

| | | | | | | p value |
|---|---|---|---|---|---|---|
| | Se- | Targeting | Targeting | Targeting | Targeting | (2-tailed |
| Guide | quence | Rep 1 | Rep 2 | Rep 3 | Rep 4 | T test) |
| DNMT1_ | gAAAAGA | 1.072633964 | 0.65965914 | | 0.827668403 | 0.000373076 |
| g1 | CGAGGA | | | | | |
| | TGAA | | | | | |
| | (SEQ | | | | | |
| | ID | | | | | |
| | NO: | | | | | |
| | 2092) | | | | | |
| DNMT1_ | gAGACAG | 0.314819763 | 0.304418458 | 0.260612729 | 0.242899 | 3.73442E−06 |
| g2 | CTTAAC | | | | | |
| | AGAA | | | | | |
| | (SEQ | | | | | |
| | ID | | | | | |
| | NO: | | | | | |
| | 2093) | | | | | |
| DNMT1_ | gGTTTAA | 0.278377062 | 0.273855622 | 0.162021476 | 0.111194092 | 0.003153651 |
| g3 | CATATG | | | | | |
| | AGTG | | | | | |
| | (SEQ | | | | | |
| | ID | | | | | |
| | NO: | | | | | |
| | 2094) | | | | | |
| DNMT1_ | gCCTAAG | 0.177124959 | 0.164299743 | 0.171190645 | 0.131435982 | 0.000102901 |
| g4 | GCCCCT | | | | | |
| | TTTC(SEQ | | | | | |
| | ID | | | | | |
| | NO: | | | | | |
| | 2095) | | | | | |
| DNMT1_ | gAGAAAA | 0.163750933 | 0.143394874 | 0.203416045 | 0.178246635 | 1.03199E−05 |
| g5 | AGAACC | | | | | |
| | TGAA | | | | | |
| | (SEQ | | | | | |
| | ID | | | | | |
| | NO: | | | | | |
| | 2096) | | | | | |
| DNMT1_ | gCCCCGG | 0.061835518 | 0.038334611 | 0.027352765 | 0.027261752 | 0.165463548 |
| g6 | TTGGTC | | | | | |
| | TTAC(SEQ | | | | | |
| | ID | | | | | |
| | NO: | | | | | |
| | 2097) | | | | | |
| VEGFA_ | gAAAAGA | 2.256517612 | 1.908146202 | 2.280491183 | 1.766814372 | 3.70939E−06 |
| g1 | GTGAAC | | | | | |
| | GAGA | | | | | |
| | (SEQ | | | | | |
| | ID | | | | | |
| | NO: | | | | | |
| | 2098) | | | | | |
| VEGFA_ | gATAGAG | 0.710804855 | 0.60404738 | 0.564880423 | 0.431536468 | 5.81344E−05 |
| g2 | CAAGAC | | | | | |
| | AAGA | | | | | |
| | (SEQ | | | | | |
| | ID | | | | | |
| | NO: | | | | | |
| | 2099) | | | | | |
| VEGFA_ | gGGAGGC | 0.04783926 | 0.049239138 | 0.046950456 | 0.048631681 | 4.63616E−07 |
| g3 | TCAAAG | | | | | |
| | AGGC | | | | | |
| | (SEQ | | | | | |
| | ID | | | | | |
| | NO: | | | | | |
| | 2100) | | | | | |
| VEGFA_ | gCCCTTC | 0 | 0.007052311 | 0 | 0.005182958 | 0.141402755 |
| g4 | AGATCA | | | | | |
| | GCTT | | | | | |
| | (SEQ | | | | | |
| | ID | | | | | |
| | NO: | | | | | |
| | 2101) | | | | | |
| VEGFA_ | gGCTGTT | 0.030619936 | 0.005038799 | 0.014452259 | 0.020447807 | 0.020315011 |
| g5 | CAGGTC | | | | | |
| | TCTG | | | | | |
| | (SEQ | | | | | |
| | ID | | | | | |
| | NO: | | | | | |
| | 2102) | | | | | |
| VEGFA_ | gAAGGCC | 0 | 0 | 0.007665038 | 0 | 0.070664369 |
| g6 | GCACAG | | | | | |
| | CTAG | | | | | |
| | (SEQ | | | | | |
| | ID | | | | | |
| | NO: | | | | | |
| | 2103) | | | | | |
| EMX1_ | gAATGGT | 1.958384333 | 1.548672566 | 1.803849158 | 1.533513564 | 3.06047E−06 |
| g1 | GGAAAC | | | | | |
| | ACAG | | | | | |
| | (SEQ | | | | | |
| | ID | | | | | |
| | NO: | | | | | |
| | 2104) | | | | | |
| EMX1_ | gGGACAT | 0.263425281 | 0.265922336 | 0.264294907 | 0.372616029 | 3.92584E−05 |
| g2 | GGCAGA | | | | | |
| | TAAT | | | | | |
| | (SEQ | | | | | |
| | ID | | | | | |
| | NO: | | | | | |
| | 2105) | | | | | |
| EMX1_ | gCCTGAC | 0.116292592 | 0.175527426 | 0.078441216 | 0.123543357 | 0.000951497 |
| g3 | TCTGCA | | | | | |
| | AAGC | | | | | |
| | (SEQ | | | | | |
| | ID | | | | | |
| | NO: | | | | | |
| | 2106) | | | | | |
| EMX1_ | gAATAGC | 0.045621533 | 0.02685562 | 0.040665904 | 0.074069854 | 0.003261575 |
| g4 | AGATTA | | | | | |
| | TTCC | | | | | |
| | (SEQ | | | | | |
| | ID | | | | | |
| | NO: | | | | | |
| | 2107) | | | | | |
| EMX1_ | gCTAGTC | 0.027511578 | 0.096091149 | 0.043548834 | 0.030868281 | 0.029757632 |
| g5 | CCTTCC | | | | | |
| | CTTT(SEQ | | | | | |
| | ID | | | | | |
| | NO: | | | | | |
| | 2108) | | | | | |
| EMX1_ | gAGCTTT | 0.016334309 | 0.017236246 | 0.013600122 | 0.004832941 | 0.017822346 |
| g6 | TTCCCT | | | | | |
| | GCAG | | | | | |
| | (SEQ | | | | | |
| | ID | | | | | |
| | NO: | | | | | |
| | 2109) | | | | | |
| RNF2_ | gTATTAT | 0.154957248 | 0.17890002 | 0.227125243 | 0.143247385 | 0.002072584 |
| g1 | ACCTGC | | | | | |
| | ACGA | | | | | |
| | (SEQ | | | | | |
| | ID | | | | | |
| | NO: | | | | | |
| | 2110) | | | | | |
| RNF2_ | gAGAATA | 0.022168736 | 0.035699574 | 0.024923671 | 0.028511961 | 0.000204006 |
| g2 | AGTTGA | | | | | |
| | GAAA | | | | | |
| | (SEQ | | | | | |
| | ID | | | | | |
| | NO: | | | | | |
| | 2111) | | | | | |
| RNF2_ | gCTTCCT | 0.011156564 | 0 | 0.006029727 | 0 | 0.116248624 |
| g3 | TCCAAG | | | | | |
| | GTCA | | | | | |
| | (SEQ | | | | | |
| | ID | | | | | |
| | NO: | | | | | |
| | 2112) | | | | | |
| RNF2_ | gTTTCTA | 0.012779961 | 0.01581878 | 0.003229766 | 0.003604123 | 0.410974349 |
| g4 | TCTGTA | | | | | |
| | AAAT | | | | | |
| | (SEQ | | | | | |
| | ID | | | | | |
| | NO: | | | | | |
| | 2113) | | | | | |
| RNF2_ | gATTTTA | 0.012835323 | 0.023784041 | 0.032782407 | 0.01409344 | 0.000267325 |
| g5 | CCTTTT | | | | | |
| | TCAA(SEQ | | | | | |
| | ID | | | | | |
| | NO: | | | | | |
| | 2114) | | | | | |
| RNF2_ | gAATTTA | 0.011674878 | 0.028580851 | 0.014731446 | 0.017115961 | 0.000118098 |
| g6 | CTTTTT | | | | | |
| | GAAA | | | | | |
| | (SEQ | | | | | |
| | ID | | | | | |
| | NO: | | | | | |
| | 2115) | | | | | |
| CXCR4_ | gCAAAGC | 0.134122288 | 0.108800774 | 0.108800774 | 0.100255195 | 6.4896E−06 |
| g1 | CCAAAG | | | | | |
| | TGGT | | | | | |
| | (SEQ | | | | | |
| | ID | | | | | |
| | NO: | | | | | |
| | 2116) | | | | | |
| CXCR4_ | gAGTGAA | 0.07815553 | 0.121625552 | 0.068431478 | 0.068431478 | 0.000784235 |
| g2 | TCACGT | | | | | |
| | AAAG | | | | | |
| | (SEQ | | | | | |
| | ID | | | | | |
| | NO: | | | | | |
| | 2117) | | | | | |
| CXCR4_ | gTTACAA | 0 | 0.006548038 | 0.006548038 | 0.017648443 | 0.080595539 |
| g3 | AATTCT | | | | | |
| | TTGT(SEQ | | | | | |
| | ID | | | | | |
| | NO: | | | | | |
| | 2118) | | | | | |
| TTLL11_ | gATTCTA | 0.366022099 | 0.437177085 | 0.429769392 | 0.403901093 | 2.41477E−07 |
| g1 | GGCATA | | | | | |
| | TGTC | | | | | |
| | (SEQ | | | | | |
| | ID | | | | | |
| | NO: | | | | | |
| | 2119) | | | | | |
| TTLL11_ | gCAAGGC | 0.051463966 | 0.039233636 | 0.053996591 | 0.039527112 | 0.014096134 |
| g2 | AGAGCC | | | | | |
| | ACGG | | | | | |
| | (SEQ | | | | | |
| | ID | | | | | |
| | NO: | | | | | |
| | 2120) | | | | | |
| TTLL11_ | gATTCAA | 0 | 0.023314099 | 0.004305983 | 0 | 0.260846138 |
| g3 | TTACTA | | | | | |
| | CCCA | | | | | |
| | (SEQ | | | | | |
| | ID | | | | | |
| | NO: | | | | | |
| | 2121) | | | | | |
| TTLL11_ | gTTTCTA | 0 | 0 | 0 | 0 | N/A |
| g4 | TGACAT | | | | | |
| | ATGC(SEQ | | | | | |
| | ID | | | | | |
| | NO: | | | | | |
| | 2122) | | | | | |
| TTLL11_ | gATAATT | 0.004805613 | 0 | 0 | 0 | 0.99710752 |
| g5 | GTTTCT | | | | | |
| | ATTC | | | | | |
| | (SEQ | | | | | |
| | ID | | | | | |
| | NO: | | | | | |
| | 2123) | | | | | |
| TTLL11_ | gAGGAGG | 0 | 0.01531941 | 0.008456302 | 0.00873744 | 0.286942892 |
| g6 | CTGTAA | | | | | |
| | ATCT | | | | | |
| | (SEQ | | | | | |
| | ID | | | | | |
| | NO: | | | | | |
| | 2124) | | | | | |
| DYNC1H1_ | gCATAAA | 0.166073072 | 0.156347128 | 0.164880462 | 0.151315555 | 6.7371E−08 |
| g1 | GTAACA | | | | | |
| | AAAC | | | | | |
| | (SEQ | | | | | |
| | ID | | | | | |
| | NO: | | | | | |
| | 2125) | | | | | |
| DYNC1H1_ | gATGTTC | 0.103883537 | 0.106560636 | 0.09729619 | 0.140374957 | 2.65811E−05 |
| g2 | ACAAGA | | | | | |
| | TAGT | | | | | |
| | (SEQ | | | | | |
| | ID | | | | | |
| | NO: | | | | | |
| | 2126) | | | | | |
| DYNC1H1_ | gAGTCTG | 0.084957968 | 0.040483004 | 0.043899639 | 0.03806735 | 0.0047032 |
| g3 | GCAAGG | | | | | |
| | CAGA | | | | | |
| | (SEQ | | | | | |
| | ID | | | | | |
| | NO: | | | | | |
| | 2127) | | | | | |
| DYNC1H1_ | gACCTGC | 0.084638172 | 0.035884094 | 0.07242628 | 0.08841733 | 0.003420442 |
| g4 | CCTAGA | | | | | |
| | AATA | | | | | |
| | (SEQ | | | | | |
| | ID | | | | | |
| | NO: | | | | | |
| | 2128) | | | | | |
| DYNC1H1_ | gCTAAAA | 0.024642681 | 0.060848401 | 0.035064343 | 0.035799523 | 0.018308875 |
| g5 | CTAACC | | | | | |
| | TGCC | | | | | |
| | (SEQ | | | | | |
| | ID | | | | | |
| | NO: | | | | | |
| | 2129) | | | | | |
| DYNC1H1_ | gGCAGTG | 0.005725082 | 0.003175309 | 0.003395586 | 0.00561435 | 0.229661813 |
| g6 | CATTTC | | | | | |
| | ACTA(SEQ | | | | | |
| | ID | | | | | |
| | NO: | | | | | |
| | 2130) | | | | | |
| DYNC1H1_ | gTTAATG | 0.003866527 | 0.008701706 | 0.01677782 | 0.020944602 | 0.103120809 |
| g7 | GTTTTC | | | | | |
| | ACAT | | | | | |
| | (SEQ | | | | | |
| | ID | | | | | |
| | NO: | | | | | |
| | 2131) | | | | | |
| ALDHIA | gAGTGGA | 1.137739046 | 1.119515885 | 0.916630292 | 1.940891045 | 0.001319886 |
| 3_ | AGAAGG | | | | | |
| g1 | AGAT | | | | | |
| | (SEQ | | | | | |
| | ID | | | | | |
| | NO: | | | | | |
| | 2132) | | | | | |
| ALDH1A3_ | gGCTCTG | 0.234226321 | 0.184977578 | 0.221238938 | 0.14900909 | 4.93864E−05 |
| g2 | CAGGAA | | | | | |
| | CAGG | | | | | |
| | (SEQ | | | | | |
| | ID | | | | | |
| | NO: | | | | | |
| | 2133) | | | | | |
| ALDH1A3_ | gTAAAAT | 0.171969046 | 0.154294531 | 0.067773636 | 0.022326412 | 0.026244571 |
| g3 | AAATTT | | | | | |
| | GCTC | | | | | |
| | (SEQ | | | | | |
| | ID | | | | | |
| | NO: | | | | | |
| | 2134) | | | | | |
| ALDH1A3_ | gAGAAGG | 0 | 0 | 0 | 0 | N/A |
| g4 | CAGCTT | | | | | |
| | TCTG | | | | | |
| | (SEQ | | | | | |
| | ID | | | | | |
| | NO: | | | | | |
| | 2135) | | | | | |
| ALDH1A3_ | gTCTGGC | 0.004161119 | 0.011395579 | 0.00623571 | 0.016026497 | 0.598222613 |
| g5 | AGAAGA | | | | | |
| | CACT | | | | | |
| | (SEQ | | | | | |
| | ID | | | | | |
| | NO: | | | | | |
| | 2136) | | | | | |
| ALDH1A3_ | gCCAGAT | 0.021824928 | 0.018056653 | 0 | 0.006874742 | 0.463508461 |
| g6 | TTCTTT | | | | | |
| | TCTC(SEQ | | | | | |
| | ID | | | | | |
| | NO: | | | | | |
| | 2137) | | | | | |

TABLE 11C
Guides and statistical analysis for FIG. 40.

| | | Non- | Non- | Non- | Non- | p value |
|---|---|---|---|---|---|---|
| | | targeting | targeting | targeting | targeting | (2-tailed |
| Guide | Sequence | Rep 1 | Rep 2 | Rep 3 | Rep 4 | T test) |
| DNMT1_g1 | gAAAAGA | 0.002401768 | 0.002041608 | 0 | 0.002784042 | 0.000373 |
| | CGAGGA | | | | | |
| | TGAA | | | | | |
| | (SEQ | | | | | |
| | ID | | | | | |
| | NO: | | | | | |
| | 2138) | | | | | |
| NMT1_g2 | gAGACAG | 0.003923415 | 0 | 0.006171982 | 0.004663309 | 3.73E−06 |
| | CTTAAC | | | | | |
| | AGAA | | | | | |
| | (SEQ | | | | | |
| | ID | | | | | |
| | NO: | | | | | |
| | 2139) | | | | | |
| NMT1_g3 | gGTTTAA | 0.00784683 | 0.002726653 | 0.012343965 | 0.010881055 | 0.003154 |
| | CATATG | | | | | |
| | AGTG | | | | | |
| | (SEQ | | | | | |
| | ID | | | | | |
| | NO: | | | | | |
| | 2140) | | | | | |
| NMT1_g4 | gCCTAAG | 0.062927552 | 0.042503864 | 0.066338785 | 0.046841399 | 0.000103 |
| | GCCCCT | | | | | |
| | TTTC | | | | | |
| | (SEQ | | | | | |
| | ID | | | | | |
| | NO: | | | | | |
| | 2141) | | | | | |
| NMT1_g5 | gAGAAAA | 0.002401768 | 0.002041608 | 0 | 0.002784042 | 1.03E−05 |
| | AGAACC | | | | | |
| | TGAA | | | | | |
| | (SEQ | | | | | |
| | ID | | | | | |
| | NO: | | | | | |
| | 2142) | | | | | |
| NMT1_g6 | gCCCCGG | 0.071047236 | 0.042503864 | 0.073201418 | 0.04258309 | 0.165464 |
| | TTGGTC | | | | | |
| | TTAC | | | | | |
| | (SEQ | | | | | |
| | ID | | | | | |
| | NO: | | | | | |
| | 2143) | | | | | |
| EGFA_g1 | gAAAAGA | 0.002895529 | 0 | 0 | 0 | 3.71E−06 |
| | GTGAAC | | | | | |
| | GAGA | | | | | |
| | (SEQ | | | | | |
| | ID | | | | | |
| | NO: | | | | | |
| | 2144) | | | | | |
| EGFA_g2 | gATAGAG | 0.001232666 | 0.003634381 | 0 | 0 | 5.81E−05 |
| | CAAGAC | | | | | |
| | AAGA | | | | | |
| | (SEQ | | | | | |
| | ID | | | | | |
| | NO: | | | | | |
| | 2145) | | | | | |
| EGFA_g3 | gGGAGGC | 0.010686615 | 0.004547625 | 0.004950863 | 0.01059294 | 4.64E−07 |
| | TCAAAG | | | | | |
| | AGGC | | | | | |
| | (SEQ | | | | | |
| | ID | | | | | |
| | NO: | | | | | |
| | 2146) | | | | | |
| EGFA_g4 | gCCCTTC | 0 | 0 | 0 | 0 | 0.141403 |
| | AGATCA | | | | | |
| | GCTT | | | | | |
| | (SEQ | | | | | |
| | ID | | | | | |
| | NO: | | | | | |
| | 2147) | | | | | |
| EGFA_g5 | gGCTGTT | 0 | 0.002814048 | 0 | 0 | 0.020315 |
| | CAGGTC | | | | | |
| | TCTG | | | | | |
| | (SEQ | | | | | |
| | ID | | | | | |
| | NO: | | | | | |
| | 2148) | | | | | |
| EGFA_g6 | gAAGGCC | 0.024044884 | 0.006821438 | 0.004950863 | 0.013241175 | 0.070664 |
| | GCACAG | | | | | |
| | CTAG | | | | | |
| | (SEQ | | | | | |
| | ID | | | | | |
| | NO: | | | | | |
| | 2149) | | | | | |
| MX1_g1 | gAATGGT | 0 | 0 | 0 | 0 | 3.06E−06 |
| | GGAAAC | | | | | |
| | ACAG | | | | | |
| | (SEQ | | | | | |
| | ID | | | | | |
| | NO: | | | | | |
| | 2150) | | | | | |
| MX1_g2 | gGGACAT | 0 | 0.005596911 | 0 | 0.002355713 | 3.93E−05 |
| | GGCAGA | | | | | |
| | TAAT | | | | | |
| | (SEQ | | | | | |
| | ID | | | | | |
| | NO: | | | | | |
| | 2151) | | | | | |
| MX1_g3 | gCCTGAC | 0 | 0 | 0.009628655 | 0 | 0.000951 |
| | TCTGCA | | | | | |
| | AAGC | | | | | |
| | (SEQ | | | | | |
| | ID | | | | | |
| | NO: | | | | | |
| | 2152) | | | | | |
| MX1_g4 | gAATAGC | 0 | 0 | 0 | 0 | 0.003262 |
| | AGATTA | | | | | |
| | TTCC | | | | | |
| | (SEQ | | | | | |
| | ID | | | | | |
| | NO: | | | | | |
| | 2153) | | | | | |
| MX1_g5 | gCTAGTC | 0 | 0 | 0.00947538 | 0.006171506 | 0.029758 |
| | CCTTCC | | | | | |
| | CTTT | | | | | |
| | (SEQ | | | | | |
| | ID | | | | | |
| | NO: | | | | | |
| | 2154) | | | | | |
| MX1_g6 | gAGCTTT | 0.005697194 | 0.003893828 | 0.002665849 | 0 | 0.017822 |
| | TTCCCT | | | | | |
| | GCAG | | | | | |
| | (SEQ | | | | | |
| | ID | | | | | |
| | NO: | | | | | |
| | 2155) | | | | | |
| NF2_g1 | gTATTAT | 0.05907765 | 0.083386145 | 0.08737758 | 0.063398845 | 0.002073 |
| | ACCTGC | | | | | |
| | ACGA | | | | | |
| | (SEQ | | | | | |
| | ID | | | | | |
| | NO: | | | | | |
| | 2156) | | | | | |
| NF2_g2 | gAGAATA | 0.05907765 | 0.073379807 | 0.076455383 | 0.063398845 | 0.000204 |
| | AGTTGA | | | | | |
| | GAAA | | | | | |
| | (SEQ | | | | | |
| | ID | | | | | |
| | NO: | | | | | |
| | 2157) | | | | | |
| NF2_g3 | gCTTCCT | 0.028760426 | 0 | 0.023276564 | 0.015143485 | 0.116249 |
| | TCCAAG | | | | | |
| | GTCA | | | | | |
| | (SEQ | | | | | |
| | ID | | | | | |
| | NO: | | | | | |
| | 2158) | | | | | |
| NF2_g4 | gTTTCTA | 0.017975266 | 0 | 0.023276564 | 0.015143485 | 0.410974 |
| | TCTGTA | | | | | |
| | AAAT | | | | | |
| | (SEQ | | | | | |
| | ID | | | | | |
| | NO: | | | | | |
| | 2159) | | | | | |
| NF2_g5 | gATTTTA | 0.062770003 | 0.080050699 | 0.083736848 | 0.066735627 | 0.000267 |
| | CCTTTT | | | | | |
| | TCAA | | | | | |
| | (SEQ | | | | | |
| | ID | | | | | |
| | NO: | | | | | |
| | 2160) | | | | | |
| NF2_g6 | gAATTTA | 0.062770003 | 0.080050699 | 0.083736848 | 0.066735627 | 0.000118 |
| | CTTTTT | | | | | |
| | GAAA | | | | | |
| | (SEQ | | | | | |
| | ID | | | | | |
| | NO: | | | | | |
| | 2161) | | | | | |
| XCR4_g1 | gCAAAGC | 0.008136697 | 0 | 0 | 0 | 6.49E−06 |
| | CCAAAG | | | | | |
| | TGGT | | | | | |
| | (SEQ | | | | | |
| | ID | | | | | |
| | NO: | | | | | |
| | 2162) | | | | | |
| XCR4_g2 | gAGTGAA | 0.008136697 | 0 | 0 | 0.006918261 | 0.000784 |
| | TCACGT | | | | | |
| | AAAG | | | | | |
| | (SEQ | | | | | |
| | ID | | | | | |
| | NO: | | | | | |
| | 2163) | | | | | |
| XCR4_g3 | gTTACAA | 0 | 0 | 0 | 0 | 0.080596 |
| | AATTCT | | | | | |
| | TTGT | | | | | |
| | (SEQ | | | | | |
| | ID | | | | | |
| | NO: | | | | | |
| | 2164) | | | | | |
| TLL11_g1 | gATTCTA | 0 | 0 | 0 | 0 | 2.41E−07 |
| | GGCATA | | | | | |
| | TGTC | | | | | |
| | (SEQ | | | | | |
| | ID | | | | | |
| | NO: | | | | | |
| | 2165) | | | | | |
| TLL11_g2 | gCAAGGC | 0.035417518 | 0.010157647 | 0.01585504 | 0.028010551 | 0.014096 |
| | AGAGCC | | | | | |
| | ACGG | | | | | |
| | (SEQ | | | | | |
| | ID | | | | | |
| | NO: | | | | | |
| | 2166) | | | | | |
| TLL11_g3 | gATTCAA | 0 | 0 | 0 | 0 | 0.260846 |
| | TTACTA | | | | | |
| | CCCA | | | | | |
| | (SEQ | | | | | |
| | ID | | | | | |
| | NO: | | | | | |
| | 2167) | | | | | |
| TLL11_g4 | gTTTCTA | 0 | 0 | 0 | 0 | N/A |
| | TGACAT | | | | | |
| | ATGC | | | | | |
| | (SEQ | | | | | |
| | ID | | | | | |
| | NO: | | | | | |
| | 2168) | | | | | |
| TLL11_g5 | gATAATT | 0 | 0 | 0 | 0.00478 | 0.997108 |
| | GTTTCT | | | | | |
| | ATTC | | | | | |
| | (SEQ | | | | | |
| | ID | | | | | |
| | NO: | | | | | |
| | 2169) | | | | | |
| TLL11_g6 | gAGGAGG | 0.029968669 | 0.008126117 | 0.004530011 | 0.021007913 | 0.286943 |
| | CTGTAA | | | | | |
| | ATCT | | | | | |
| | (SEQ | | | | | |
| | ID | | | | | |
| | NO: | | | | | |
| | 2170) | | | | | |
| YNC1H1_ | gCATAAA | 0.021546236 | 0.022641199 | 0.015949281 | 0.028466374 | 6.74E−08 |
| g1 | GTAACA | | | | | |
| | AAAC | | | | | |
| | (SEQ | | | | | |
| | ID | | | | | |
| | NO: | | | | | |
| | 2171) | | | | | |
| YNC1H1_ | gATGTTC | 0.001451948 | 0.001450074 | 0.001473796 | 0.001739584 | 2.66E−05 |
| g2 | ACAAGA | | | | | |
| | TAGT | | | | | |
| | (SEQ | | | | | |
| | ID | | | | | |
| | NO: | | | | | |
| | 2172) | | | | | |
| YNC1H1_ | gAGTCTG | 0.001451948 | 0.004350222 | 0.001473796 | 0.005218753 | 0.004703 |
| g3 | GCAAGG | | | | | |
| | CAGA | | | | | |
| | (SEQ | | | | | |
| | ID | | | | | |
| | NO: | | | | | |
| | 2173) | | | | | |
| YNC1H1_ | gACCTGC | 0.010387991 | 0.018835939 | 0.014041493 | 0.011356324 | 0.00342 |
| g4 | CCTAGA | | | | | |
| | AATA | | | | | |
| | (SEQ | | | | | |
| | ID | | | | | |
| | NO: | | | | | |
| | 2174) | | | | | |
| YNC1H1_ | gCTAAAA | 0.010387991 | 0.018835939 | 0.014041493 | 0.011356324 | 0.018309 |
| g5 | CTAACC | | | | | |
| | TGCC | | | | | |
| | (SEQ | | | | | |
| | ID | | | | | |
| | NO: | | | | | |
| | 2175) | | | | | |
| YNC1H1_ | gGCAGTG | 0 | 0.011301563 | 0.010531119 | 0.011356324 | 0.229662 |
| g6 | CATTTC | | | | | |
| | ACTA | | | | | |
| | (SEQ | | | | | |
| | ID | | | | | |
| | NO: | | | | | |
| | 2176) | | | | | |
| YNC1H1_ | gTTAATG | 0.019587488 | 0.022641199 | 0.015949281 | 0.026094176 | 0.103121 |
| g7 | GTTTTC | | | | | |
| | ACAT | | | | | |
| | (SEQ | | | | | |
| | ID | | | | | |
| | NO: | | | | | |
| | 2177) | | | | | |
| LDH1A3_ | gAGTGGA | 0 | 0 | 0 | 0 | 0.00132 |
| g1 | AGAAGG | | | | | |
| | AGAT | | | | | |
| | (SEQ | | | | | |
| | ID | | | | | |
| | NO: | | | | | |
| | 2178) | | | | | |
| LDH1A3_ | gGCTCTG | 0 | 0 | 0 | 0 | 4.94E−05 |
| g2 | CAGGAA | | | | | |
| | CAGG | | | | | |
| | (SEQ | | | | | |
| | ID | | | | | |
| | NO: | | | | | |
| | 2179) | | | | | |
| LDH1A3_ | gTAAAAT | 0 | 0 | 0 | 0 | 0.026245 |
| g3 | AAATTT | | | | | |
| | GCTC | | | | | |
| | (SEQ | | | | | |
| | ID | | | | | |
| | NO: | | | | | |
| | 2180) | | | | | |
| LDH1A3_ | gAGAAGG | 0 | 0 | 0 | 0 | N/A |
| g4 | CAGCTT | | | | | |
| | TCTG | | | | | |
| | (SEQ | | | | | |
| | ID | | | | | |
| | NO: | | | | | |
| | 2181) | | | | | |
| LDH1A3_ | gTCTGGC | 0.004822996 | 0.006558524 | 0.014718509 | 0.022568269 | 0.598223 |
| g5 | AGAAGA | | | | | |
| | CACT | | | | | |
| | (SEQ | | | | | |
| | ID | | | | | |
| | NO: | | | | | |
| | 2182) | | | | | |
| LDH1A3_ | gCCAGAT | 0 | 0.004372349 | 0.009812339 | 0.014105168 | 0.463508 |
| g6 | TTCTTT | | | | | |
| | TCTC | | | | | |
| | (SEQ | | | | | |
| | ID | | | | | |
| | NO: | | | | | |
| | 2183) | | | | | |

TABLE 11D
12-Guide Pool Methods

| | | | | Guide | | | | | |
|---|---|---|---|---|---|---|---|---|---|
| | | | | Sequence | | | | | |
| | | | | (OwzoIscB, | | | | | |
| | | | OgeuIscB | OiziIscB, | OwzoIscB | | OwflIsCB | | UwstIscB |
| | | Guide | indel | OwflIscB, | indel | OiziIscB | indel | UpfjIscB | indel |
| | | Sequence | rate | UpfjIscB, | rate | indel rate | rate | indel | rate |
| Key | Gene | (OgeuIscB) | (%) | UwstIscB) | (%) | (%) | (%) | rate (%) | (%) |
| 1 | EMX1 | CGGTT | 0.017386913 | CCCCC | 0.018779343 | 0.045248869 | 0 | 0 | 0 |
| | | CCGCA | | TTCCC | | | | | |
| | | GGACC | | TATGG | | | | | |
| | | CAGGG | | GAATA | | | | | |
| | | (SEQ | | (SEQ | | | | | |
| | | ID | | ID | | | | | |
| | | NO: | | NO: | | | | | |
| | | 2184) | | 2185) | | | | | |
| 2 | EMX1 | AGTGG | 0.032829941 | ACTAC | 0.018779343 | 0.045248869 | 0 | 0.012954207 | 0 |
| | | TGCCT | | AGTGG | | | | | |
| | | GGAAA | | TGCCT | | | | | |
| | | ATAAA | | GGAAA | | | | | |
| | | (SEQ | | (SEQ | | | | | |
| | | ID | | ID | | | | | |
| | | NO: | | NO: | | | | | |
| | | 2186) | | 2187) | | | | | |
| 3 | EMX1 | CCCCC | 0.049244911 | ATGCA | 0.003716336 | 0.003555359 | 0.003713492 | 0.00391324 | 0.003742 |
| | | TTCCC | | TATAC | | | | | |
| | | TATGG | | CAGTT | | | | | |
| | | GAATA | | TGTGG | | | | | |
| | | (SEQ | | (SEQ | | | | | |
| | | ID | | ID | | | | | |
| | | NO: | | NO: | | | | | |
| | | 2188) | | 2189) | | | | | |
| 4 | DNMT1 | ACCGG | 0.069069859 | ACGAA | 0.004224489 | 0.00526556 | 0.003445751 | 0.001942936 | 0.00568 |
| | | GAAGT | | TTTCT | | | | | |
| | | GAATG | | GCAAA | | | | | |
| | | GACGT | | CAGAA | | | | | |
| | | (SEQ | | (SEQ | | | | | |
| | | ID | | ID | | | | | |
| | | NO: | | NO: | | | | | |
| | | 2190) | | 2191) | | | | | |
| 5 | DNMT1 | CTCCA | 0.062491777 | TTTAT | 0.005869406 | 0.006949578 | 0.004543917 | 0.008654182 | 0.004322 |
| | | AGGAC | | TTTAG | | | | | |
| | | AAATC | | CTGAA | | | | | |
| | | TTTAT | | GGGAA | | | | | |
| | | (SEQ | | (SEQ | | | | | |
| | | ID | | ID | | | | | |
| | | NO: | | NO: | | | | | |
| | | 2192) | | 2193) | | | | | |
| 6 | DNMT1 | CCAAG | 0.05810639 | TTTAT | 0.005869406 | 0.006949578 | 0.004543917 | 0.008654182 | 0.004322 |
| | | CAAGA | | TTCCC | | | | | |
| | | AGTGA | | TTCAG | | | | | |
| | | AGCCC | | CTAAA | | | | | |
| | | (SEQ | | (SEQ | | | | | |
| | | ID | | ID | | | | | |
| | | NO: | | NO: | | | | | |
| | | 2194) | | 2195) | | | | | |
| 7 | VEGFA | TCCCA | 0.026608274 | GAGAG | 0 | 0 | 0 | 0.775193798 | 0 |
| | | AAGAT | | CAAAA | | | | | |
| | | GCCCA | | GATAC | | | | | |
| | | CCTGC | | ATCTC | | | | | |
| | | (SEQ | | (SEQ | | | | | |
| | | ID | | ID | | | | | |
| | | NO2196) | | NO: | | | | | |
| | | | | 2197) | | | | | |
| 8 | VEGFA | ATCAA | 0.19699036 | ATTTG | 0 | 0 | 0 | 0.775193798 | 0 |
| | | AAAGA | | TACCG | | | | | |
| | | GTGAA | | GTTTT | | | | | |
| | | CGAGA | | TGTAT | | | | | |
| | | (SEQ | | (SEQ | | | | | |
| | | ID | | ID | | | | | |
| | | NO: | | NO: | | | | | |
| | | 2198) | | 2199) | | | | | |
| 9 | VEGFA | TGGTG | 0.181254444 | TGTGC | 0.006639886 | 0.003995481 | 0.007802074 | 0.00517844 | 0.01231 |
| | | GTCTG | | CCATT | | | | | |
| | | GATAA | | GGTGG | | | | | |
| | | AAGAA | | TCTGG | | | | | |
| | | (SEQ | | (SEQ | | | | | |
| | | ID | | ID | | | | | |
| | | NO: | | NO: | | | | | |
| | | 2200) | | 2201) | | | | | |
| 10 | FANCF | CGCAG | 0.001424547 | TATTC | 0 | 0.018749232 | 0 | 0.017373176 | 0.003696 |
| | | AGAGT | | CTGAC | | | | | |
| | | CGCCG | | ACTGC | | | | | |
| | | TCTCC | | CAGGA | | | | | |
| | | (SEQ | | (SEQ | | | | | |
| | | ID | | ID | | | | | |
| | | NO: | | NO: | | | | | |
| | | 2202) | | 2203) | | | | | |
| 11 | FANCF | TTTAA | 0.064947114 | GGGAC | 0 | 0.021335333 | 0 | 0.018952555 | 0.011088 |
| | | AGAAA | | AGAAA | | | | | |
| | | AAGCA | | ACCTA | | | | | |
| | | GCTTT | | GAAAA | | | | | |
| | | (SEQ | | (SEQ | | | | | |
| | | ID | | ID | | | | | |
| | | NO: | | NO: | | | | | |
| | | 2204) | | 2205) | | | | | |
| 12 | FANCF | TCTGT | 0.041751716 | TTTAA | 0 | 0 | 0 | 0 | 0 |
| | | CCCTC | | GAGCA | | | | | |
| | | CCTCA | | TCGAA | | | | | |
| | | GTAGT | | CAATA | | | | | |
| | | (SEQ | | (SEQ | | | | | |
| | | ID | | ID | | | | | |
| | | NO: | | NO: | | | | | |
| | | 2206) | | 2207) | | | | | |

### Tables 12A-G. Accession Numbers and Position Information for Loci Displayed in Figures.

TABLE 12A
Pertains to FIGS. 9C, 9F.

| Sub- | | Feature of | | | |
|---|---|---|---|---|---|
| panel | Contig accession | interest | start | end | strand |
| 9C | Ga0348337_018242 | CRISPR- | 802 | 2175 | 1 |
| | | associated | | | |
| | | IscB | | | |
| 9F | NZ_ADVG01000001 | IscB | 305647 | 306958 | −1 |

TABLE 12B
Pertains to FIG. 16A.

| | | Feature of | | | |
|---|---|---|---|---|---|
| FIG. Subpanel | Contig accession | interest | start | end | strand |
| 16A (P. excrementihominis strain BIOML-A6) | WNCH01000015.1 | IscB | 57970 | 59260 | 1 |
| 16A (Prevotellaceae bacterium UBA3839) | DGHV01000076.1 | IscB | 29502 | 30768 | −1 |
| 16A (K. racemifer - transposon expansion, left) | NZ_ADVG01000003 | IscB | 1805791 | 1807081 | −1 |
| 16A (K. racemifer - transposon expansion, right) | NZ_ADVG01000001 | IscB | 2708268 | 2709558 | 1 |
| 16A (K. racemifer - cis ωRNA) | NZ_ADVG01000001 | IscB | 2516461 | 2517751 | −1 |
| 16A (K. racemifer - trans ωRNA), B | NZ_ADVG01000001 | ORNA | 704325 | 704688 | 1 |

TABLE 12C
Pertains to FIG. 31B.

| | Contig | Feature | | | |
|---|---|---|---|---|---|
| FIG. Subpanel | accession | of interest | start | end | strand |
| 31B (K. racemifer - IsrB) | NZ_ADVG01000004 | IsrB | 697010 | 698075 | 1 |
| 31B (K. racemifer - IscB) | NZ_ADVG01000003 | IscB | 1400692 | 1401982 | 1 |
| 31B (Bacteriodales RUG11478) | CACXPM010000003.1 | IscB | 91847 | 93110 | −1 |
| 31B (Tissierellia AS22ysBPME_61) | JAAZKS010000250.1 | IscB | 1343 | 2939 | −1 |
| 31B (Armatimonadota) | Ga0315277_10040887 | Cas9 | 1829 | 3848 | 1 |
| 31B (Nitrospirae RBG_13_39_12) | MHEF01000135.1 | Cas9 | 1737 | 4026 | 1 |
| 31B (C. jejuni strain NCTC 11168) | SZUC01000003.1 | Cas9 | 186809 | 189764 | −1 |

TABLE 12D
Pertains to FIGS. 39C, H.

| | | Feature | | | |
|---|---|---|---|---|---|
| FIG. | | of | | | |
| Subpanel | Contig accession | interest | start | end | strand |
| 39C | KY407659 | IscB | 21119 | 22433 | −1 |
| 39H | NZ_ADVG01000001 | IsrB | 97894 | 980013 | −1 |

TABLE 12E
Pertains to FIG. 51A-C

| FIG. | Contig | Feature of | | | |
|---|---|---|---|---|---|
| Subpanel | accession | interest | start | end | strand |
| 51A, B, C | NDEV01000101 | class III alcohol | 5301 | 6411 | 1 |
| (top locus) | | dehydrogenase | | | |
| 51A, B, C | RCAL01000070 | IscB | 14393 | 15798 | 1 |
| (bottom locus) | | | | | |
| 51A, B, C | RCAL01000070 | class III alcohol | 15794 | 16904 | 1 |
| (bottom locus) | | dehydrogenase | | | |

TABLE 12F
Pertains to FIG. 44.

| From | | Feature | | | |
|---|---|---|---|---|---|
| top to | | of | | | |
| bottom | Contig accession | interest | start | end | strand |
| Locus 1 | FZOK01000004.1 | Cas9 | 172500 | 177072 | −1 |
| Locus 2 | CP003281.1 | Cas9 | 3445310 | 3449369 | −1 |
| Locus 3 | FNXE01000009.1 | Cas9 | 43590 | 47886 | 1 |
| Locus 4 | AQHR01000065.1 | Cas9 | 18175 | 22762 | 1 |
| Locus 5 | QQBA01000002.1 | Cas9 | 136771 | 141220 | −1 |
| Locus 6 | CP007035.1 | Cas9 | 301950 | 306231 | 1 |

TABLE 12G
Pertains to FIG. 61A.

| FIG. | | | Feature of | | | |
|---|---|---|---|---|---|---|
| Subpanel | Database | Contig accession | interest | start | end | strand |
| 61A | NCBI | JACHNC010000001 | tnpB | 9479671 | 9480832 | −1 |

### Discussion

[1064] Naturally programmable biological systems offer an efficient solution for diverse organisms to achieve scalable complexity via modularity of their components. RNA-guided defense and regulatory systems, which are widespread in prokaryotes and eukaryotes, are a prominent case in point, and have served as the basis of numerous biotechnology applications thanks to the ease with which they can be engineered and reprogrammed (Hüttenhofer, A., et al. (2006), Nat. Rev. Genet. 7, 475-482; Schneider, A. et al. (2020), EMBO Rep. 21, e51918; Koonin, E. et al. (2017), Biol. Direct. 12 e51918).

[1065] Here, through the exploration of Cas9 evolution, Applicants discovered the programmable RNA-guided mechanism of 3 highly abundant but previously uncharacterized transposon-encoded nucleases: IscB, IsrB, and TnpB, which Applicants collectively refer to as Q (OMEGA: Obligate Mobile Element Guided Activity) (FIG. 45) because the mobile element localization and movement likely determines the identity of their guides. Although the biological functions of Ω systems remain unknown, several hypotheses are compatible with the available evidence, including roles in facilitating TnpA-catalyzed, RNA-guided transposition, or acting as a toxin, with the transposon acting as the antitoxin, securing maintenance of IS200/605 insertions (Supplementary Text).

[1066] The broad distribution of the Ω systems characterized here indicates that RNA-guided mechanisms are more widespread in prokaryotes than previously suspected and suggests that RNA-guided activities are likely ancient and evolved on multiple, independent occasions, of which only the most common ones have likely been identified so far. The TnpB family is far more abundant and diverse than the IscB family; indeed, Applicants identified more than a million putative tnpB loci in bacterial and archaeal genomes, making it one of the most common prokaryotic genes altogether. These TnpBs might represent an untapped wealth of diverse RNA-guided mechanisms present not only in prokaryotes, but also in eukaryotes. Combined with our identification of a chloroplast-encoded IscB, these findings suggest that the expansion of RNA-guided systems into eukaryotic genomes could be a general phenomenon, and more broadly, that RNA-guided systems are functionally diverse and permeate all domains of life.

### REFERENCES AND NOTES

[1067] 1. F. Zhang, Development of CRISPR-Cas systems for genome editing and beyond. Quarterly Reviews of Biophysics. 52 (2019).
[1068] 2. F. Hille, H. Richter, S. P. Wong, M. Bratovie, S. Ressel, E. Charpentier, The biology of CRISPR-Cas: Backward and forward. Cell. 172, 1239-1259 (2018).
[1069] 3. V. V. Kapitonov, K. S. Makarova, E. V. Koonin, ISC, a novel group of bacterial and Archaeal DNA transposons that encode Cas9 homologs. J. Bacteriol. 198, 797-807 (2015).
[1070] 4. P. Siguier, E. Gourbeyre, M. Chandler, Bacterial insertion sequences: their genomic impact and diversity. FEMS Microbiol. Rev. 38, 865-891 (2014).
[1071] 5. S. Shmakov, A. Smargon, D. Scott, D. Cox, N. Pyzocha, W. Yan, O. O. Abudayyeh, J. S. Gootenberg, K. S. Makarova, Y. I. Wolf, K. Severinov, F. Zhang, E. V. Koonin, Diversity and evolution of class 2 CRISPR-Cas systems. Nat. Rev. Microbiol. 15, 169-182 (2017).
[1072] 6. B. Zetsche, J. S. Gootenberg, O. O. Abudayyeh, I. M. Slaymaker, K. S. Makarova, P. Essletzbichler, S. E. Volz, J. Joung, J. van der Oost, A. Regev, E. V. Koonin, F. Zhang, Cpfl is a single RNA-guided endonuclease of a class 2 CRISPR-Cas system. Cell. 163, 759-771 (2015).
[1073] 7. E. Deltcheva, K. Chylinski, C. M. Sharma, K. Gonzales, Y. Chao, Z. A. Pirzada, M. R. Eckert, J. Vogel, E. Charpentier, CRISPR RNA maturation by trans-encoded small RNA and host factor RNase III. Nature. 471, 602-607 (2011).
[1074] 8. I. Kalvari, E. P. Nawrocki, N. Ontiveros-Palacios, J. Argasinska, K.

[1075] Lamkiewicz, M. Marz, S. Griffiths-Jones, C. Toffano-Nioche, D. Gautheret, Z. Weinberg, E. Rivas, S. R. Eddy, R. D. Finn, A. Bateman, A. I. Petrov. Rfam 14: expanded coverage of metagenomic, viral and microRNA families. Nucleic Acids Res. 49, D192-D200 (2021).
[1076] 9. Z. Weinberg, J. Perreault, M. M. Meyer, R. R. Breaker, Exceptional structured noncoding RNAs revealed by bacterial metagenome analysis. Nature. 462, 656-659 (2009).
[1077] 10. M. Jinek, K. Chylinski, I. Fonfara, M. Hauer, J. A. Doudna, E. Charpentier, A programmable dual-RNA-guided DNA endonuclease in adaptive bacterial immunity. Science. 337, 816-821 (2012).
[1078] 11. G. Gasiunas, R. Barrangou, P. Horvath, V. Siksnys, Cas9-crRNA ribonucleoprotein complex mediates specific DNA cleavage for adaptive immunity in bacteria. Proc. Natl. Acad. Sci. U.S.A 109, E2579-86 (2012).
[1079] 12. G. Gasiunas, J. K. Young, T. Karvelis, D. Kazlauskas, T. Urbaitis, M. Jasnauskaite, M. M. Grusyte, S. Paulraj, P.-H. Wang, Z. Hou, S. K. Dooley, M. Cigan, C. Alarcon, N. D. Chilcoat, G. Bigelyte, J. L. Curcuru, M. Mabuchi, Z. Sun, R. T. Fuchs, E. Schildkraut, P. R. Weigele, W. E. Jack, G. B. Robb, C. Venclovas, V. Siksnys, A catalogue of biochemically diverse CRISPR-Cas9 orthologs. Nat. Commun. 11, 5512 (2020).
[1080] 13. M. Jinek, F. Jiang, D. W. Taylor, S. H. Sternberg, E. Kaya, E. Ma, C. Anders, M. Hauer, K. Zhou, S. Lin, M. Kaplan, A. T. Iavarone, E. Charpentier, E. Nogales, J. A. Doudna, Structures of Cas9 endonucleases reveal RNA-mediated conformational activation. Science. 343, 1247997 (2014).
[1081] 14. B. Q. Minh, H. A. Schmidt, O. Chernomor, D. Schrempf, M. D. Woodhams, A. von Haeseler, R. Lanfear, IQ-TREE 2: New Models and Efficient Methods for Phylogenetic Inference in the Genomic Era. Mol. Biol. Evol. 37, 1530-1534 (2020).
[1082] 15. K. S. Makarova, Y. I. Wolf, J. Iranzo, S. A. Shmakov, O. S. Alkhnbashi, S. J. J. Brouns, E. Charpentier, D. Cheng, D. H. Haft, P. Horvath, S. Moineau, F. J. M. Mojica, D. Scott, S. A. Shah, V. Siksnys, M. P. Terns, Č. Venclovas, M. F. White, A. F. Yakunin, W. Yan, F. Zhang, R. A. Garrett, R. Backofen, J. van der Oost, R. Barrangou, E. V. Koonin, Evolutionary classification of CRISPR-Cas systems: a burst of class 2 and derived variants. Nat. Rev. Microbiol. 18, 67-83 (2020).
[1083] 16. K. A. Majorek, S. Dunin-Horkawicz, K. Steczkiewicz, A. Muszewska, M. Nowotny, K. Ginalski, J. M. Bujnicki, The RNase H-like superfamily: new members, comparative structural analysis and evolutionary classification. Nucleic Acids Res. 42, 4160-4179 (2014).
[1084] 17. H. Nishimasu, F. A. Ran, P. D. Hsu, S. Konermann, S. I. Shehata, N. Dohmae, R. Ishitani, F. Zhang, O. Nureki, Crystal structure of Cas9 in complex with guide RNA and target DNA. Cell. 156, 935-949 (2014).
[1085] 18. W. Bao, J. Jurka, Homologues of bacterial TnpB_IS605 are widespread in diverse eukaryotic transposable elements. Mob. DNA. 4, 12 (2013).
[1086] 19. J. V. Gomes-Filho, L. S. Zaramela, V. C. da S. Italiani, N. S. Baliga, R. Z. N. Vêncio, T. Koide, Sense overlapping transcripts in IS1341-type transposase genes are functional non-coding RNAs in archaea. RNA Biol. 12, 490-500 (2015).
[1087] 20. Z. Weinberg, C. E. Lunse, K. A. Corbino, T. D. Ames, J. W. Nelson, A. Roth, K. R. Perkins, M. E. Sherlock, R. R. Breaker, Detection of 224 candidate structured RNAs by comparative analysis of specific subsets of intergenic regions. Nucleic Acids Res. 45, 10811-10823 (2017).
[1088] 21. A. Hüttenhofer, P. Schattner, The principles of guiding by RNA: chimeric RNA-protein enzymes. Nat. Rev. Genet. 7, 475-482 (2006).
[1089] 22. A. Schneider, A short history of guide RNAs: The intricate path that led to the discovery of a basic biological concept. EMBO Rep. 21, e51918 (2020).
[1090] 23. E. V. Koonin, Evolution of RNA- and DNA-guided antivirus defense systems in prokaryotes and eukaryotes: common ancestry vs convergence. Biol. Direct. 12(2017).
[1091] 24. H. Altae-Tran, S. Kannan, F. Zhang, Code and processed data for: The widespread IS200/605 transposon family encodes diverse programmable RNA-guided endonucleases, Version 1.0, Zenodo (2021); <link to be inserted after official acceptance of manuscript>.
[1092] 25. C. Camacho, G. Coulouris, V. Avagyan, N. Ma, J. Papadopoulos, K. Bealer, T. L. Madden, BLAST+: architecture and applications. BMC Bioinformatics. 10, 421 (2009).
[1093] 26. K. Katoh, D. M. Standley, MAFFT multiple sequence alignment software version 7: improvements in performance and usability. Mol. Biol. Evol. 30, 772-780 (2013).
[1094] 27. M. Steinegger, J. Soding, MMseqs2 enables sensitive protein sequence searching for the analysis of massive data sets. Nat. Biotechnol. 35, 1026-1028 (2017).
[1095] 28. M. Steinegger, M. Meier, M. Mirdita, H. Vöhringer, S. J. Haunsberger, J. Soding, HH-suite3 for fast remote homology detection and deep protein annotation. BMC Bioinformatics. 20, 473 (2019).
[1096] 29. S. R. Eddy, Accelerated Profile HMM Searches. PLoS Comput. Biol. 7, e1002195 (2011).
[1097] 30. S. A. Shmakov, K. S. Makarova, Y. I. Wolf, K. V. Severinov, E. V. Koonin, Systematic prediction of genes functionally linked to CRISPR-Cas systems by gene neighborhood analysis. Proc. Natd. Acad. Sci. U.S.A 115, E5307-E5316 (2018).
[1098] 31. A. B. Crawley, J. R. Henriksen, R. Barrangou, CRISPRdisco: An Automated Pipeline for the Discovery and Analysis of CRISPR-Cas Systems. CRISPR J. 1, 171-181 (2018).
[1099] 32. D. H. Haft, B. J. Loftus, D. L. Richardson, F. Yang, J. A. Eisen, I. T. Paulsen, O. White, TIGRFAMs: a protein family resource for the functional identification of proteins. Nucleic Acids Res. 29, 41-43 (2001).
[1100] 33. A. Delcher, Improved microbial gene identification with GLIMMER. Nucleic Acids Research. 27 (1999), pp. 4636-4641.
[1101] 34. S. Naser-Khdour, B. Q. Minh, W. Zhang, E. A. Stone, R. Lanfear, The Prevalence and Impact of Model Violations in Phylogenetic Analysis. Genome Biol. Evol. 11, 3341-3352 (2019).
[1102] 35. S. Kalyaanamoorthy, B. Q. Minh, T. K. F. Wong, A. von Haeseler, L. S. Jermiin, ModelFinder: fast model selection for accurate phylogenetic estimates. Nat. Methods. 14, 587-589 (2017).
[1103] 36. M. N. Price, P. S. Dehal, A. P. Arkin, FastTree 2—approximately maximum-likelihood trees for large alignments. PLoS One. 5, e9490 (2010).
[1104] 37. G. Altekar, S. Dwarkadas, J. P. Huelsenbeck, F. Ronquist, Parallel Metropolis coupled Markov chain Monte Carlo for ian posterian phylogenetic inference. Bioinformatics. 20, 407-415 (2004).
[1105] 38. A. Stamatakis, RA×ML version 8: a tool for phylogenetic analysis and post-analysis of large phylogenies. Bioinformatics. 30, 1312-1313 (2014).
[1106] 39. R. Lorenz, S. H. Bernhart, C. H. zu Siederdissen, H. Tafer, C. Flamm, P. F. Stadler, I. L. Hofacker, ViennaRNA Package 2.0. Algorithms Mol. Biol. 6, 1-14 (2011).
[1107] 40. E. Rivas, J. Clements, S. R. Eddy, A statistical test for conserved RNA structure shows lack of evidence for structure in incRNAs. Nat. Methods. 14, 45-48 (2017).
[1108] 41. E. P. Nawrocki, S. R. Eddy, Infernal 1.1: 100-fold faster RNA homology searches. Bioinformatics. 29, 2933-2935 (2013).
[1109] 42. Z. Weinberg, R. R. Breaker, R2R—software to speed the depiction of aesthetic consensus RNA secondary structures. BMC Bioinformatics. 12, 3 (2011).
[1110] 43. J. Mistry, S. Chuguransky, L. Williams, M. Qureshi, G. A. Salazar, E. L. L. Sonnhammer, S. C. E. Tosatto, L. Paladin, S. Raj, L. J. Richardson, R. D. Finn, A. Bateman, Pfam: The protein families database in 2021. Nucleic Acids Res. 49, D412-D419 (2021).
[1111] 44. C. Bland, T. L. Ramsey, F. Sabree, M. Lowe, K. Brown, N. C. Kyrpides, P. Hugenholtz, CRISPR recognition tool (CRT): a tool for automatic detection of clustered regularly interspaced palindromic repeats. BMC Bioinformatics. 8, 209 (2007).
[1112] 45. F. Asnicar, G. Weingart, T. L. Tickle, C. Huttenhower, N. Segata, Compact graphical representation of phylogenetic data and metadata with GraPhlAn. PeerJ. 3, e1029 (2015).
[1113] 46. L. Maaten, G. Hinton, Visualizing Data using t-SNE. Journal of machine learning research. 9, 2579-2605 (2008).
[1114] 47. P. G. Policar, M. Strazar, B. Zupan, Embedding to reference t-SNE space addresses batch effects in single-cell classification. bioRxiv (2019), doi:10.1101/671404.
[1115] 48. P. J. Rousseeuw, Silhouettes: A graphical aid to the interpretation and validation of cluster analysis. J. Comput. Appl. Math. 20, 53-65 (1987).
[1116] 49. R. J. G. B. Campello, D. Moulavi, J. Sander, in Advances in Knowledge Discovery and Data Mining (Springer Berlin Heidelberg, Berlin, Heidelberg, 2013), Lecture notes in computer science, pp. 160-172.
[1117] 50. D. H. Parks, M. Imelfort, C. T. Skennerton, P. Hugenholtz, G. W. Tyson, CheckM: assessing the quality of microbial genomes recovered from isolates, single cells, and metagenomes. Genome Res. 25, 1043-1055 (2015).
[1118] 51. P.-A. Chaumeil, A. J. Mussig, P. Hugenholtz, D. H. Parks, GTDB-Tk: a toolkit to classify genomes with the Genome Taxonomy Database. Bioinformatics (2019), doi:10.1093/bioinformatics/btz848.
[1119] 52. S. Frey, D. Gorlich, A new set of highly efficient, tag-cleaving proteases for purifying recombinant proteins. J. Chromatogr. A. 1337, 95-105 (2014).
[1120] 53. M. Martin, Cutadapt removes adapter sequences from high-throughput sequencing reads. EMBnet.journal. 17, 10-12 (2011).
[1121] 54. B. Langmead, S. L. Salzberg, Fast gapped-read alignment with Bowtie 2. Nat. Methods. 9, 357-359 (2012).
[1122] 55. A. M. Sriramachandran, G. Petrosino, M. Mendez-Lago, A. J. Schafer, L. S. Batista-Nascimento, N. Zilio, H. D. Ulrich, Genome-wide Nucleotide-Resolution Mapping of DNA Replication Patterns, Single-Strand Breaks, and Lesions by GLOE-Seq. Mol. Cell. 78, 975-985.e7 (2020).
[1123] 56. K. Clement, H. Rees, M. C. Canver, J. M. Gehrke, R. Farouni, J. Y. Hsu, M. A. Cole, D. R. Liu, J. K. Joung, D. E. Bauer, L. Pinello, CRISPResso2 provides accurate and rapid genome editing sequence analysis. Nat. Biotechnol. 37, 224-226 (2019).
[1124] 57. A. Bankevich, S. Nurk, D. Antipov, A. A. Gurevich, M. Dvorkin, A. S. Kulikov, V. M. Lesin, S. I. Nikolenko, S. Pham, A. D. Prjibelski, A. V. Pyshkin, A. V. Sirotkin, N. Vyahhi, G. Tesler, M. A. Alekseyev, P. A. Pevzner, SPAdes: a new genome assembly algorithm and its applications to single-cell sequencing. J. Comput. Biol. 19, 455-477 (2012).
[1125] 58. M. Turmel, C. Otis, C. Lemieux, Divergent copies of the large inverted repeat in the chloroplast genomes of ulvophycean green algae. Sci. Rep. 7, 994 (2017).
[1126] 59. D. T. Hoang, O. Chernomor, A. von Haeseler, B. Q. Minh, L. S. Vinh, UFBoot2: Improving the Ultrafast Bootstrap Approximation. Mol. Biol. Evol. 35, 518-522 (2018).
[1127] 60. P. J. Lockhart, A. W. Larkum, M. Steel, P. J. Waddell, D. Penny, Evolution of chlorophyll and bacteriochlorophyll: the problem of invariant sites in sequence analysis. Proc. Natl. Acad. Sci. U.S.A 93, 1930-1934 (1996).
[1128] 61. A. Criscuolo, S. Gribaldo, BMGE (Block Mapping and Gathering with Entropy): a new software for selection of phylogenetic informative regions from multiple sequence alignments. BMC Evol. Biol. 10, 210 (2010).
[1129] 62. J. Strecker, A. Ladha, Z. Gardner, J. L. Schmid-Burgk, K. S. Makarova, E. V. Koonin, F. Zhang, RNA-guided DNA insertion with CRISPR-associated transposases. Science. 365, 48-53 (2019).
[1130] 63. S. E. Klompe, P. L. H. Vo, T. S. Halpin-Healy, S. H. Sternberg, Transposon-encoded CRISPR-Cas systems direct RNA-guided DNA integration. Nature. 571, 219-225 (2019).
[1131] 64. M. Krupovic, K. S. Makarova, P. Forterre, D. Prangishvili, E. V. Koonin, Casposons: a new superfamily of self-synthesizing DNA transposons at the origin of prokaryotic CRISPR-Cas immunity. BMC Biol. 12, 1-12 (2014).
[1132] 65. S. M. Crotty, B. Q. Minh, N. G. Bean, B. R. Holland, J. Tuke, L. S. Jermiin, A. V. Haeseler, GHOST: Recovering Historical Signal from Heterotachously Evolved Sequence Alignments. Syst. Biol. 69, 249-264 (2020).

### Example 4

[1133] FIG. 62 shows reclustering CRISPR-associated IscB polypeptide at 60% sequence identity reveals novel IscB proteins. The IscB proteins comprise an X domain and a Y domain. CRISPR-associated IscB proteins from 00644 cluster were functional with an NAC PAM (FIG. 63A showing IscB protein of locus JGI accession Gaa0099850_1002913; FIG. 63B showing IscB protein of JGI accession Ga0348337_018242; FIG. 63C showing IscB protein of locus JGI accession Ga0208542_1002724).

### Materials and Methods

### Profile Curation

[1134] Initial IscB sequences were curated using NCBI's PSI-BLAST on the NR database with 8 iterations from a starting seed sequence up to a maximum of 20000 target sequences (Camacho, C. et al. (2009), BMC Bioinformatics. 10, 421). Strong filtering parameters (expect threshold of 1e-5 and PSI-BLAST threshold of 1e-6) were selected to reduce the accumulation of unrelated proteins also containing HNH domains, such as restriction enzymes or homing endonucleases. All proteins smaller than 260 aa were discarded. The remaining proteins were then aligned using MAFFT FFT-NS-1 and partial proteins as well as proteins with poor alignment coverage to the HNH domain were discarded (Kotah, K., et al. (2013), Mol. Biol. Evol. 30, 772-780). The filtered set was then clustered using MMSeqs2 at 70% sequence identity with a minimum coverage of 70%. The MMSeqs2 representatives for each cluster were then aligned using MAFFT-einsi (Steinegger, M. et al. (2017), Nat. Biotechnol. 35, 1026-1028). The resulting alignment was further split into multiple domains (PLMP, RuvC-I, RuvC-II, HNH, and RuvC-III) in order to create distinct HHAlign profiles for the respective regions (Steinegger, M. et al. (2019), BMC Bioinformatics. 20, 473). For HMMER profiles, the PLMP, HNH, and RuvC-III were used to create separate profiles. RuvC-I, BH, and RuvC-II were combined into a single HMMER profile to reduce false positives (Eddy, S., et al. (2018), Proc. Natl. Acad. Sci. U.S.A 115, E5307-E5316).

[1135] Due to the extensive diversity in TnpA, a PSI-BLAST search resulted in more than 20000 homologous sequences. Because TnpA consists of a single contiguous catalytic domain, HHblits was instead used to identify more non-redundant homologs using an E-value cutoff of 1e-3, minimum hit probability of 80% and 8 iterations on the UniRef30_2020_06 database (Steinegger, M. et al. (2019), BMC Bioinformatics. 20, 473). The resulting proteins were aligned using MAFFT-einsi, and partial proteins were removed (Kotah, K., et al. (2013), Mol. Biol. Evol. 30, 772-780). The resulting alignment was used to create an HMMER profile.

### Identification of IscB, IsrB, and IshA

[1136] All prokaryotic (bacterial+archaeal) genomes were downloaded from NCBI, and NCBI WGS, as well as JGI projects for which express permission was given, and were combined into a single prokaryotic database. ORFs on all contigs were predicted with TTG, TAG, and TAA stop codons, and ATG start codons (with a minimum size of 55 aa), allowing for alternative start codons GTG (if it produced a minimum ORF size of 100 aa), TTG (if it produced a minimum ORF size of 100 aa) or CTG (if it produced a minimum ORF size of 300 aa). In the case of multiple potential start sites with different start codons for the same potential ORF, all potential start sites were listed in order of increasing corresponding ORF size. A best start site was iteratively selected by traversing the list and selecting a new best start site based on the previous one with the first item in the list selected as the initial best. GTG/TTG start sites were accepted as best if they would make the ORF 20 aa longer than the current best start site, while CTG was accepted only if it would make the protein 40 aa longer than the current best start site. Any ATG start site larger than the current best was automatically selected. ORFs sharing the same stop location and strand (+/−) as an existing protein annotation were discarded in favor of the existing annotation. All ORFs were then searched using HMMER and the 4 IscB profiles with a minimum bit score of 18. Any ORF/protein with a hit to any of the 4 domains was considered a protein of interest (POI) and retained for further analysis. For redundancy reduction, all proteins were then clustered using MMSeqs2 at 90% sequence identity with 85% coverage. Within each 90% cluster, proteins smaller than the 80^{th} percentile in length were discarded. Of the remaining proteins, proteins containing X (ambiguous) amino acids were discarded unless their removal would result in an empty set of sequences. Of the remaining proteins, the sequence with the largest minimum distance from either the start or the end of the protein-coding sequence to the edge of the respective contig, that is, the protein sequence farthest away from either edge of the containing contig, was selected as the cluster representative. Representative proteins with start or end sites within 200 bp of contig edges were considered partial and were subsequently discarded. These remaining representative sequences constituted non-redundant POIs. The non-redundant POIs were then further clustered into “clusters” (as opposed to non-redundant sequences) using MMSeqs2 at 65% sequence identity and 70% sequence coverage. For each cluster, the representative sequence was taken to be the sequence with the 90^{th} percentile length in the cluster. The use of 90^{th} percentile reflect the skew towards protein fragments that are often observed in large clusters. Unless specified otherwise, when referring to a cluster's components, such as the protein ORF (e.g. IscB cluster 2089) or associated RNA sequence (e.g. 2089 ncRNA), it is the respective component of the representative locus for that cluster that is being referenced.

### IscB-IsrB-Cas9 RuvC BH and RuvC/BH/HNH Domain Based Phylogenetic Analysis

[1137] Cas9s identified from the IscB domain-based search exhibited monophyletic branching from a RuvC-based tree, however not all Cas9s were identified from this search. To expand the space of Cas9s included in the analysis, Cas9 profiles from the Koonin Lab (30), TIGRFAM, and profiles made from MAFFT alignments of Cas9 proteins from CRISPRDisco were used to identify additional Cas9 proteins not found in the initial IscB domain-based search using HMMER with a minimum bit score of 25 and protein length of 500 aa (Kotah, K. et al. (2013), Mol. Biol. Evol. 30, 772-780; Crawley, A. et al. (2018), CRISPR J. 1, 171-181; Haft, D. et al. (2001), Nucleic Acids Res. 29, 41-43). Cas9 proteins from the IscB domain search were combined with the Cas9 proteins from the Cas9 search and deduplicated. The Cas9 ORF start sites were then refined using GLIMMER (Delcher, A, et al. (1999), Nucleic Acids Res. 29, 41-43). The superset of Cas9 proteins were then clustered 90% sequence identity with 85% coverage and redundancy reduced in the same manner as for the IscB search. The superset of non-redundant Cas9 proteins were then reclustered at 50% sequence identity and 60% coverage. The choice of 50% sequence identity reflects the difference in the size of conserved regions between IscBs and Cas9s with approximately 100 aa more slowly evolving in the key regions (RuvC, BH, and HNH). The clustering criteria of 65% minimum sequence identity for 400 aa proteins is functionally similar to 65%-100/400+100/1000=50% sequence identity for larger 1000 aa Cas9s with the same conserved domains spanning approximately 100 aa. For each cluster, the representative sequence was taken to be the sequence with the 90^{th} percentile length in the cluster.

[1138] Clusters were additionally filtered for homology to IscB/Cas9 catalytic domains using profile-profile comparison. Specifically, for each cluster, the non-redundant sequences in the cluster were aligned using MAFFT in order to generate hhm inputs for HHAlign. These resulting alignments were then compared to the 6 IscB domain alignments using HHAlign (for IscB/IsrB clusters), or the corresponding 8 Cas9 domain hhm profiles of the equivalent regions (RuvC-I, Bridge Helix, REC1, REC2, RuvC-II, HNH, RuvC-III). IscB/IsrB clusters were selected for further analysis if at least two hits to any of the IscB RuvC-I, RuvC-II, or RuvC-III domains were identified through HHAlign (with a minimum bit score of 17). Cas9 clusters were selected for further analysis if at least two hits to any of the IscB RuvC-I, RuvC-II, or RuvC-III domains were identified through HHAlign (with a minimum bit score of 17), or if any two hits to the Cas9 RuvC-I, RuvC-II, RuvC-III domains were identified through HHAlign (with a minimum bit score of 17). The passing Cas9 clusters were then pooled with the passing IscB clusters for phylogenetic analysis.

[1139] IscB, IsrB and Cas9 obtained from the above filtering criteria were aligned using MAFFT-x2 (two iterations) and BLOSUM62 scoring (default if not otherwise specified). The RuvC-I and BH regions of Cas9 did not align with the RuvC-I and BH regions of IscB and IsrB due to the different domain architectures and sizes of these divergent protein families. RuvC-I and BH were manually grouped and realigned using MAFFT-x2. Sequences with poor coverage at the RuvC-I domain region of the alignment were removed if their HHAlign score to either the IscB-RuvC-I or Cas9-RuvC-I profiles were less than 21. Small proteins with both Cas9-like and IscB-like sequences containing HHAlign hits to RuvC-I and BH typically did not have correct alignments with RuvC-I and BH relative to all other proteins due to their hybrid nature. For such proteins, all amino acids between the N-terminus and RuvC-II were grouped together as RuvC-I and BH for alignment. RuvC-I and BH regions were then realigned using MAFFT-linsi. IsrB aligned columns from the HNH domain were moved to the RuvC-II column group. RuvC-II, RuvC-III, HNH, and PLMP domains were then sequentially aligned using MAFFT-linsi. Excess regions between the BH domain and RuvC-II were then aligned using MAFFT-einsi and BLOSUM30 for identification of REC-like insertions. Sequences with no or poor alignment to any of the RuvC or BH domains were removed. The resulting alignment was then used for phylogenetic analysis.

[1140] All domains not common to all 3 types of proteins, namely PLMP, REC1, REC2, PI domains, and IscB/IsrB C-terminal domains were removed from the alignment, leaving a trimmed alignment containing only the highly conserved portions of the RuvC-I, BH, RuvC-II, and RuvC-III domains, creating a RuvC/BH alignment containing IscB, IsrB, and Cas9. Another alignment was created containing only RuvC-I, BH, RuvC-II, HNH, and RuvC-III domains for only IscB and Cas9, termed the RuvC/BH/HNH alignment. For both of these alignments, clusters with dead representative sequences (sequences with key catalytic sites mutated) were removed. Specifically, the positions filtered were the RuvC-I conserved D, RuvC-II conserved E, HNH Conserved H (when applicable), and RuvC-III conserved D and H. Positions (columns) with more than 75% gaps were also removed. Symmetry tests implemented in IQ-Tree 2 were used to identify potential phylogenetic violations for the alignments (FIG. 22) (Naser-Khdour, S. et al. (2019), Genome Biol. Evol. 11, 3341-3352). The RuvC/BH/HNH alignment displayed significant violation to the stationarity assumption of the three main assumptions used in typical phylogenetic analysis (reversibility, stationarity, homogeneity). As the alignment contained too many taxa for the use of heterotachy models in IQ-Tree 2, Applicants use a subtractive approach to identify the source of the stationarity violation. Preliminary analyses showed that the major clade of II-B Cas9s consistently split from the rest of Cas9s with a branch length of ≥1, suggesting its accurate placement along the tree might be difficult. Applicants removed the major clade of II-B Cas9s from the RuvC/BH/HNH alignment, which substantially reduced the stationarity violation as determined by marginal symmetry test p-value (FIG. 22). Applicants also created another alignment only consisting of IscB and Cas9s from the early stages of Cas9 evolution, which completely eliminated any stationarity violation. For both of these additional alignments, catalytically inactive variants were removed as described for the RuvC/BH and RuvC/BH/HNH alignments, and positions (columns) with more than 75% gaps were removed. For each alignment, substitution model selection was performed using the ModelFinder tool implemented in IQ-Tree 2 (Kalyaanamoorthy, S. et al. (2017), Nat. Methods. 14, 587-589). Optimal models were selected using the Akaike Information Criterion corrected for small sample sizes (AICc). In most cases, the AICc best model differed from the Bayesian Information Criterion (BIC) or AIC (standard Akaike Information Criterion), and some analyses were run for both sets of models; however, AICc was generally preferred due the small sample size correction. Then, for each alignment, phylogenetic trees were built using multiple methods for cross comparison (IQ-Tree 2, RA×ML, MrBayes). While FastTree2 was used for quick visualizations of phylogenetic information, the likelihood scores obtained using this method were substantially worse than those for IQ-Tree 2, RA×ML, or MrBayes (Mihn, B., et al. (2020), Mol. Biol. Evol. 37, 1530-1534; Price, M., et al. (2010), PLoS One. 5, e9490; Altekar, G. et al. (2004), Bioinformatics. 20, 407-415; Stamatakis, A. et al. (2014), Bioinformatics. 30, 1312-1313). As a result, FastTree2 was not used for comprehensive cross comparisons.

[1141] For FIG. 31A, a hybrid tree approach was used in order to condense the information pertinent to Cas9 while maintaining phylogenetic accuracy. For this approach, a subsample of Cas9 clusters were selected from the alignment, in addition to the complete set of IscB and IsrBs. The resulting sub-alignment was then used for phylogenetic inference using IQ-Tree 2 with identical parameters. Due to the potentially skewed Cas9 related information present in the sub-alignment, placement of the Cas9 lineage was inferred from the tree built with the original alignment. This was done by detaching the Cas9 branch from the sub alignment tree and replacing the original Cas9 branch on the original tree with the smaller detached branch. The branch selected for grafting was the branching between Cas9_849 and all other Cas9s, as this region shared the same topology between both trees. The ordering of Cas9 subtype evolution was checked for consistency between each tree to ensure compatibility after having substantially downsampled Cas9 proteins.

### IscB/IsrB ωRNA Discovery, Curation, and Analysis

[1142] Using results from just the IscB domain search, all representatives from clusters with at least 3 proteins and at least 2 HHAlign hits to any of RuvC-I, RuvC-II, or RuvC-III with at least 17 bit score were collected. All regions upstream (−300 bp to +200 bp of the start codon), and downstream (−200 bp to +300 bp of the stop codon) for all IscB and IsrB proteins were aligned separately using MAFFT-einsi. The upstream alignment demonstrated large conserved regions outside of the typical CDS boundaries of the IscB/IsrB. The downstream alignment did not contain any large conserved region and was discarded for further analysis. Individual sequences in the conserved upstream region were folded using ViennaRNA RNAFold (Lorenz, R. et al. (2011), Algorithms Mol. Biol. 6, 1-14). Sequences in the alignment were split into separate groups on the basis of conservation to key distinct regions in the alignment. The main group was labeled G1a and spanned a large number of IscB ωRNAs. R-scape was used to infer covariance-folded RNA structures that correct for phylogenetic correlations (Rivas, E. et al. (2017), Nat. Methods. 14, 45-48). The R-scape parameters used for all profiles was an E-value threshold of 1e-2 and a gap threshold of 0.75. CMbuild from Infernal was used to optimize the RNA alignments and build covariance models (CMs) (Nawrocki, E. et al. (2013), Bioinformatics. 29, 2933-2935). R2R was used to visualize the resulting RNA structures (Weinberg, Z. et al. (2011), BMC Bioinformatics. 12, 3). Additional alignment groups for IscB/IsrB ωRNAs (G1b-i) were iteratively created based on conserved upstream regions (relative to the ORF) from clades of IscB/IsrB in the RuvC tree that were not strongly associated with existing ωRNA groups. Models for these groups were built in the same manner, except the consensus secondary structure identified using ViennaRNA was used in place of the R-scape structure when the sample size was too small to permit an accurate covariance-folded structure. Due to this small sample size, in FIG. 1G, for the CRISPR-associated IscB ncRNA, nucleotides with ≥97% identity and nucleotides with ≥90% identity are the same by definition and were displayed as being ≥90% to avoid overstating their level of conservation in the presence of limited data. Pseudoknots were not explicitly encoded in the covariance models for Infernal. The structure for the hybrid CRISPR/ωRNA associated with CRISPR-associated IscBs was inferred in the same way, using the consensus secondary structure in lieu of the covariance-folded structure due to small sample size.

[1143] All IscB/IsrB ωRNA CM profiles were then searched against the prokaryotic database using cmsearch with a minimum bit score of 20 to identify potential ωRNAs (Nawrocki, E. et al. (2013), Bioinformatics. 29, 2933-2935).

[1144] Overlapping profile hits were resolved by assigning the group of overlapping hits to the profile hit that produced the highest bit score. ωRNAs were annotated using the natural target search analysis

### Natural Target Search

[1145] For the target search, a separate database was curated consisting of plasmids and bacteriophage/archaeal viruses from the NCBI microbial genomes portal. The 30 bp upstream from each ωRNA scaffold as determined by CMsearch along with the generated profiles was used as the corresponding guide sequence for that ωRNA. Guides were then searched against the prokaryotic database or the plasmid/viral database for potential spacer matches using a minimum bit score cutoff of 44. To remove candidate target hits that are related to the original guide/ωRNA pair, a separate pruning step was performed. For each target hit, the corresponding ωRNA scaffold of the guide that generated the hit was separately blasted against a 300 bp window around the target. For this second search, if the ωRNA scaffold had a match within the window with a bit score of 44 or higher and was found within 15 bp of the identified target, the target was discarded for being too similar to the original locus.

[1146] Target hits were then searched for evidence of transposition. For each guide/target pair, the sequence consisting of up to 2000 bp downstream from the end of the ωRNA scaffold was used as a 3′ prime seed. This seed region was then searched against the target contig using blastn with a minimum bit score of 44. Hits from this search were discarded if the strand was not the same as the guide/target match strand. Moreover, hits that were not both ≤50 bp downstream from the guide/target match site and ≤15 bp upstream from the guide/target match site were discarded for being implausible insertion sites. If any 3′ seed hits remained at this stage, the guide/target pair was considered to be associated with transposon insertion/transposition. In this case, of the remaining 3′ seed hits, the most upstream hit was selected, which along with the guide/target site demarcated the 3′ insertion site flanking region and 5′ insertion site flanking region respectively. Guide/target pairs that did not have an identifiable 3′ insertion site flanking region were not considered insertion linked and were discarded unless their guide/target match bit score was ≥50, which approximately corresponded to an E-value of 0.02 for the given size of the prokaryotic database.

[1147] To determine if prophage sequences might be a target for ωRNAs, all guide/target pairs were analyzed to detect if the guide targeted ORFs. Specifically, a guide was considered ORF targeting if any corresponding target was found to overlap with an ORF in the given database. All targeted ORFs were then searched for possible PFAM hits using HMMER and the Pfam34 database (Mistry, S. et al. (2021), Nucleic Acids Res. 49, D412-D419) and a minimum bit score of 18. All ORFs that had any hit to any phage Pfam profiles listed in Table 12 were considered phage targets, and the corresponding guide was labeled as phage ORF targeting.

[1148] ωRNAs were then further annotated as being near IscB/IsrB fragments based on the presence of any nearby ORF (≤2000 bp) with an HMMER hit of 18 bits or higher to any of the 4 IscB HMM profiles. ωRNAs were then clustered as follows. ωRNA scaffold sequences were clustered at 95% sequence identity using cd-hit-est using only global+/+strand comparisons.

[1149] Similarly, all spacers were clustered at 95% sequence identity using cd-hit-est using only global+/+strand comparisons. ωRNAs were then grouped according to both their ωRNA scaffold cluster id (ωRNA_id) and their spacer cluster id (spacer id). Each (ωRNA_id, spacer id) group was then classified as being associated near IscB if any ωRNA in the group was considered near IscB/IsrB fragments. Then, for each ωRNA_id, the fraction of all (ωRNA_id, spacer id) pairs considered associated with IscB/IsrBs was computed. If this fraction was ≤0.75, the ωRNA_id was classified as being associated with standalone ωRNAs, and this classification was propagated back to all IscB/IsrB ωRNAs according to their ωRNA_id.

### Anti-Repeat Determination

[1150] For CRISPR associated IscB, IsrBs, and Cas9s, anti-repeats corresponding to likely tracrRNA regions were identified as follows. For each locus, the closest predicted CRISPR array to the locus within 10 kbp of the protein of interest (POI) (namely IscB, IsrB, or Cas9) was selected. If no such array was identified, the analysis was not performed for the given locus. Next, edit distance between each direct repeat in the selected CRISPR array was computed. The resulting edit distance matrix was used to a medoid direct repeat that had the lowest average edit distance to all other direct repeats in the CRISPR array. The medoid direct repeat was then searched against the 10 kbp window around the POI using blastn with a word size of 4. Hits with bit score <20 were discarded. Hits that mapped to any predicted CRISPR array were used for calibration. Specifically, all such CRISPR array matching hits were collected into a list, and the 20^{th} quantile bit score of such hits was denoted the min_crispr_score. Any hit that was found ≤40 bp of any CRISPR array was discarded as a potential anti-repeat due to its high proximity to CRISPR arrays suggesting the hit could simply be another CRISPR direct repeat. Hits occurring inside the protein of interest were also discarded. Remaining hits occurring ≤500 bp from either the POI or any predicted CRISPR array were retained. For each hit in this final list, if the region of the query median direct repeat that produced the hit does not reach ≤3 bp of either edge of the direct repeat, the hit was discarded as a potential anti-repeat due to the likely inability to produce a stable lower stem region for the putative repeat-anti-repeat stem-loop. If any hits remained, these hits were considered anti-repeats for the POI.

[1151] Anti-repeats were then used to predict potential tracrRNAs for specific Cas9s. This process involved taking the anti-repeat region and extending it until the boundary of the neighboring feature (either protein gene or CRISPR array). TracrRNAs were predicted in this manner for the tracrRNAs shown in FIG. 31B.

### Cluster Annotation

[1152] All 10 kb genomic frames (10 kb region around the protein-coding gene of interest (POI)) were collected, and encompassed all unique/non-redundant IscB, IsrB, and Cas9 genes (according to their 90% redundancy reducing clustering id, denoted mc_id). CRISPR arrays were identified using CRT (Bland, C. et al. (2007) BMC Bioinformatics. 8, 209). TnpA was predicted for all ORFs within 10 kb of a POI using HMMER with a minimum bit-score cutoff of 18.0. All ωRNA annotations from the natural target search were merged with the corresponding genomic frames when applicable. RNA profile hits with a bit-score below 35 were discarded. For each genomic frame, all ωRNAs predictions were merged with the POIs according to their genomic locations. All ωRNAs further than 250 bp away from either end of the POI were considered to be unrelated to the POI. Any ωRNAs closer than 250 bp were considered related to the POI, and in the case of multiple such ωRNAs, only the closest one to the POI was considered for tabulation purposes. For each POI, a locus boundary was then computed as follows. A minimal locus interval [L, R] was set to encompass the POI and associated ωRNA when applicable. Then, iteratively, all other ORFs and CRISPR arrays in the contig were considered for addition into the locus interval, upon which a new minimal interval [L′, R′] would be computed to encompass all elements in the locus. Specifically, an ORF was added to the locus if it was ≤1000 bp from the existing interval and contained a Cas1, Cas2, Cas4, or Csn2 HMM profile hit with a minimum bit score of 25 as determined by hmmsearch. CRISPR arrays were included if they were ≤500 bp from the existing interval and contained ≥3 direct repeats and had a median direct repeat length of ≥25 bp. The locus determination process was terminated once no new elements were being added, resulting in a final locus interval [L, R], which Applicants termed the locus bounds. ORFs with HMMER hits to TnpA with a minimum bit score of 14 was then considered tnpA and a part of the locus if they were ≤500 bp away from the locus bounds ([L, R]).

[1153] For tabulation of cluster annotations, all POIs and corresponding locus information were grouped by cluster id (c_id). POIs with ‘X’ amino acids in the sequence translation were discarded. Moreover, POIs with ≤250 bp distance to either edge of the contig were also discarded. The resulting locus features (features within the locus bounds [L, R])), and tnpA association were then used to tabulate aggregate metrics, such as average CRISPR association (fraction of loci in the cluster that have a CRISPR array within the locus bounds), tnpA association, and various cas gene associations. Anti-repeat association rates were also calculated in this way using anti-repeats as determined above, where loci that did not contain a CRISPR directly inside the locus bounds ([L, R]) were considered to not have an anti-repeat. For natural target search tabulations, the associated ωRNA in the locus bounds for POI closest to the POI was used. The fraction of associated ωRNAs in the cluster targeting genomic regions, plasmids, and phage were tabulated. Similarly, the fraction of associated ωRNAs associated with standalone ωRNAs for the cluster was also calculated. Lastly, the fraction of associated ωRNAs in the cluster that demonstrated evidence of insertion/transposition was also computed for each cluster.

[1154] For tabulation of protein domains, the hhm profile for the alignment of non-redundant sequences from the cluster was used to identify domain hits. Specifically, the cluster was considered to have the PLMP domain if the cluster alignment had an HHAlign match to the IscB PLMP domain with a bit score ≥30. Likewise, the cluster was considered to have the HNH domain if the cluster alignment had an HHAlign match to the IscB HNH domain with a bit score ≥25. As the HNH has multiple variants of the motif (often being replaced by HNN as in most Cas9s), the identity of the last amino acid in the HNH motif (e.g. HNH vs HNN) was computed for the cluster according to the corresponding position in alignment of representative sequences used for the phylogenetic analysis.

[1155] The protein length for each cluster was taken to be the non-gapped length of the cluster representative in the alignment containing all IscB, IsrB, and Cas9 cluster representative sequences (IscB_IsrB_Cas9_full_gappy.fasta). The calculated protein length therefore reflected the trimming of large (>50 aa) non-homologous sequences at the protein termini as determined from the IscB_IsrB_Cas9_full_gappy.fasta file. REC-like regions were taken to be the region directly between the Bridge Helix and the RuvC-II domain as found in the alignment of cluster representatives. The REC-like regions are found in IscB_IsrB_Cas9_REC_only.fasta. Lengths of REC-like insertions for each cluster were taken to be the non-gapped lengths from the REC alignment. GraPhlAn was used to visualize the resulting information on different phylogenetic trees (Asnicar, F. et al. (2015), PeerJ. 3, e1029).

[1156] Throughout the text, where fraction of loci containing a specific feature are computed, the analysis considered only the non-inactivated IsrB loci, as determined by RuvC/BH alignment, and the non-activated IscB and Cas9 loci as determined by the RuvC/BH/HNH. In addition, proteins from cluster 34507 were also included despite being considered an inactivated cluster because the cluster contains active CRISPR-associated IscB variants.

### IscB/IsrB ωRNA Phylogenetic Analysis

[1157] All iscB/isrB associated ωRNAs from the loci of cluster representatives were collected.

For CRISPR-associated ωRNAs, the entire region spanning the CRISPR array and the remainder of the ωRNA scaffold was taken to be the corresponding RNA for the system. These RNAs were then converted to DNA sequences and aligned using MAFFT-ginsi to identify conserved regions spanning multiple types of RNAs. A phylogenetic tree was then constructed using IQ-Tree 2 with 5000 rapid bootstraps with hill climbing, a GTR substitution model with 4 Gamma rate categories.

[1158] To analyze the relationship between II-D tracrRNAs and ωRNAs, cmsearch was used to identify if the predicted II-D tracrRNAs contained any homology to IscB/IsrB ωRNAs using the corresponding IscB/IsrB ωRNA profiles. Based on the potential homology determined this way, a small panel of ωRNAs that were highly related to the II-D tracrRNAs were combined with synthetic single guide sequences from II-D systems constructed by concatenating the DR with ‘AAAA’ and the predicted tracrRNA. These combined sequences were then aligned using MAFFT. The resulting alignment was used for Bayesian phylogenetic analysis with MrBayes with 2 chains at a delta temperature of 0.025 with 8 independent runs for 5M generations. A standard GTR model with gamma rates and 4 categories was used.

### Binning of Yellowstone Lake Metagenomes

[1159] Tetranucleotide frequencies of assembled metagenomes (contigs ≥5 kb) provided an input for the t-stochastic neighbor embedding (t-SNE) analysis, which reduced the data to two dimensions (Maaten, L. et al. (2008), Journal of Machine Learning, 9, 2579-2605). Applicants used openTSNE (Policar, P. et al. (2019, bioRxiv (2019), doi:10.1101/671404) because of its speed and scalability. The perplexity parameter was set at 40, while the learning rate and the number of iterations were variable. Typically, both were set to larger values for bigger datasets. A grid search coupled with silhouette scores (Rousseeuw, P. et al. (1987), J Comput. Appl. Math. 20, 53-65) was used to find optimal parameters for density-based clustering (Campello, R. et al. (2013), Advances in Knowledge Discovery and Data Mining, Lecture Notes in Computer Science, pp. 160-172) (HDBSCAN) of data points from the t-SNE plot (MD and WPI, in preparation). DNA sequences were grouped into metagenome-assembled genomes (MAGs), and their completeness was evaluated using CheckM (Parks, D. et al. (2015), Genome Res. 25, 1043-1055). The GTDB Toolkit (Chaumeil, P. et al. (2019), Bioinformatics doi:10.1093/bioinformatics/btz848) was used to classify MAGs into taxonomic groups based on the Genome Taxonomy Database.

### Identification of Guide Encoding Mechanisms for IscB IsrB ωRNA

[1160] Upon complete classification and curation of all major ωRNA types according to IscB and IsrB, the genome of K. racemifer was searched for all instances of IscB and IsrB using HMMER with the previously described profiles. The genome was also searched for all instances of IscB/IsrB ωRNAs using CMsearch with the G1a-G1i RNA covariance models. Occurrences of multiple nearly identical IscBs associated with nearly identical ωRNAs were identified with BLASTn and was classified as transposon expansion. Occurrences of ωRNAs without detectable IscBs or IsrBs within 500 bp on the same strand were classified as standalone trans-acting ωRNAs. In some instances, ωRNAs and corresponding IscB/IsrBs were separated by the insertion of unrelated transposons between them. In such cases, the ωRNA was not considered a trans-acting ωRNA.

[1161] All covariance models were searched against our prokaryotic genome database. Examples with multiple ωRNAs on the same strand within 300 bp were retained for further analysis and categorized as ωRNA arrays.

### Identification of Eukaryotic IscB Orthologs.

[1162] All eukaryotic genomes were downloaded from NCBI. In order to capture all possible IscBs, existing gene models were discarded for this analysis. All DNA sequences were translated into 6 frame amino acids translations and split into ORFs by splitting across stop codons (*).

[1163] Each ORF was then searched for IscB domains using the HMMER profiles generated by the IscB profile curation step. ORFs with hits to both IscB HNH and RuvC domains were retained for further analysis. The regions around the ORFs were then searched for IscB-linked ωRNAs using CMsearch and the IscB-linked ωRNA covariance models created in this study.

Codon Analysis of I. tetrasporus Chloroplast IscB

[1164] All previously annotated ORFs from the NCBI chloroplast genome KY407659 were obtained and classified as non-IscB or IscB using a BLASTp search with the single intact IscB as the query. ORFs corresponding to IscB fragments were discarded. For each remaining IscB or non-IscB ORF, the average codon usage for each of the 60 codons was computed as a vector, pi, where pic is the fraction of codons in ORF i that use codon c. The average and standard deviations of p across i (excluding IscB ORFs) were computed to get distribution information for how the codon usage varies across different non-IscB ORFs. The codon usage of the single IscB ORF for each codon was then compared to the average and standard deviation of codon usage across all the other non-IscB ORFs. To quantitively assess how different the IscB codon usage is relative to other ORFs in the same genome, p was averaged across the non-IscB ORFs to obtain an average distribution of codon usage, which Applicants referred to as the reference distribution. For each ORF, the Kullback-Leibler divergence between the ORF's codon usage, pi, and the reference codon usage distribution was computed.

### Discovery of IshB

[1165] The powerset of all possible domain combinations of the PLMP, RuvC-I, BH, RuvC-II, HNH, and RuvC-III domains was generated. For each domain combination, the number of clusters from the IscB domain search with a hit to every domain in the combination with a minimum bit score of 21 was computed. Domain combinations that exhibited high levels of protein sequence conservation within the combination were retained for further analysis. Domain combinations that were N-terminal or C-terminal truncations of IscB, Cas9, or IsrB were discarded. From the remaining combinations, PLMP+HNH displayed high cluster counts relative to the other domain combinations, such as RuvC-II+PLMP only, suggesting that the combination corresponded to a true protein family. These proteins were subsequently named IshB due to the presence of an HNH domain, while also containing the PLMP domain present in IscB and IsrB.

### Taxonomy Analysis of IscB, IsrB, and Cas9

[1166] Taxonomy information for available genomes were obtained from the NCBI microbial genomes portal. Genomes which lacked taxonomic information or metagenomes were discarded for this analysis. Genes were classified into IsrB, IscB, Cas9, or other on the basis of their cluster id. The fraction of genomes in each taxonomic group containing IsrB, IscB, or Cas9 was computed. For each gene type (IscB, IsrB, and Cas9) the distribution of the number of genes per genome in each taxonomic group was calculated. Box plots of gene counts per taxonomic group was then computed using Python.

### TnpB Curation and Analysis of ωRNA

[1167] Examples of IscB-linked ωRNA from K. racemifer were searched in the K. racemifer genome using BLASTn. Hits in the vicinity of IscB or IsrB were discarded. Multiple partial hits were found in the vicinity of TnpB, with the hit being always downstream of the TnpB gene.

[1168] Exploration of these hits showed that multiple TnpBs shared transposon ends with IscB. An upstream and downstream locus conservation analysis was performed for related TnpB loci as done for IscB. As TnpB is highly diverse, only TnpBs that were identifiable via high similarity in an mmseqs2 search were included. The RNA-seq traces were then used to identify the 5′ RNA boundary on the TnpB ωRNAs in the conservation analysis. These ωRNAs from the conservation analysis were then extracted and used to create an R-scape secondary structure with an E-value threshold of 1e-2 and a gap threshold of 0.75.

### Expression and Purification of CRISPR-Associated IscB RNPs

[1169] To purify the CRISPR-associated IscB in complex with the ncRNA of its native locus, the human codon optimized CRISPR-associated IscB protein was cloned into a modified pET45b(+) backbone with an N-terminal His14-MBP-bdSUMO tag (Frey, S. et al. (2014), J. Chromatogr. A. 1337, 95-105), and C-terminal twin-strep tag. The non-coding part of the CRISPR-associated IscB locus was cloned into a separate pCOLADuet-1 vector, and co-expressed with the CRISPR-associated IscB protein in Rosetta(DE3)pLysS strain (EMD Millipore) (Tables 5, 9). Cells were grown at 37° C. in the terrific broth (TB) medium supplemented with 100 μg/ml ampicillin, 25 μg/ml kanamycin, and 34 μg/ml chloramphenicol until reaching an optical density (OD600) of 0.3, then shifted to 18° C., and grown further until OD600 was 0.7. The bacterial culture was induced overnight at 18° C. with 0.2 mM isopropyl β-D-1thiogalactopyranoside (IPTG) and harvested by centrifugation. The cell paste was resuspended in lysis buffer (50 mM Tris pH 8, 200 mM NaCl, 5% glycerol, 5 mM MgCl₂, and 1 mM DTT) supplemented with protease inhibitors (PMSF and Roche cOmplete, EDTA-free), and lysed by two passes with a high-pressure homogenizer (LM20 Microfluidizer, Microfluidics). The lysate was cleared by centrifugation, and the soluble fraction was gently mixed with Strep-Tactin Superflow Plus resin (Qiagen) at 4° C. The resin was first washed with lysis buffer, then briefly with buffer A (50 mM Tris pH 8, 1 M NaCl, 5% glycerol, 5 mM MgCl₂, and 1 mM DTT), and buffer B (50 mM Tris pH 8, 500 mM NaCl, 5% glycerol, 5 mM MgCl₂, and 1 mM DTT) on a gravity flow column. Bound RNP was then eluted in buffer B supplemented with 5 mM desthiobiotin (Sigma), and the N-terminal solubility tag was cleaved using bdSENP1 protease.

[1170] Once the boundaries of the co-purified RNA were defined by small RNA sequencing, the predicted ncRNA sequence was cloned downstream of a T7 promoter in a pCOLADuet-1 vector for inducible expression. The CRISPR-associated IscB-ncRNA complexes used for in vitro cleavage assays were then prepared following the same procedure explained above.

Small RNA Sequencing: Heterologous Expression in E. coli

[1171] Stbl3 chemically competent E. coli were transformed with plasmids containing the locus of interest. A single colony was used to seed a 5 mL overnight culture. Following overnight growth, cultures were spun down, resuspended in 750 μL TRI reagent (Zymo) and incubated for 5 min at room temperature. 0.5 mm zirconia/silica beads (BioSpec Products) were added and the culture was vortexed for approximately 1 minute to mechanically lyse cells. 200 μL chloroform (Sigma Aldrich) was then added, culture was inverted gently to mix and incubated at room temperature for 3 min, followed by spinning at 12000×g at 4° C. for 15 min. The aqueous phase was used as input for RNA extraction using a Direct-zol RNA miniprep plus kit (Zymo). Extracted RNA was treated with 10 units of DNase I (NEB) for 30 min at 37° C. to remove residual DNA and purified again with an RNA Clean & Concentrator-25 kit (Zymo). Ribosomal RNA was removed using a RiboMinus Transcriptome Isolation Kit for bacteria (Thermo Fisher Scientific) as per the manufacturer's protocol using half-volume reactions. The purified sample was then treated with 20 units of T4 polynucleotide kinase (NEB) for 6 h at 37° C. and purified again with an RNA Clean & Concentrator-25 (Zymo) kit. The purified RNA was treated with 20 units of 5′ RNA polyphosphatase (Lucigen) for 30 min at 37° C. and purified again using an RNA Clean & Concentrator-5 kit (Zymo). Purified RNA was used as input to an NEBNext Small RNA Library Prep for Illumina (NEB) as per the manufacturer's protocol with an extension time of 60 s and 16 cycles in the final PCR. Amplified libraries were gel extracted, quantified by qPCR using a KAPA Library Quantification Kit for Illumina (Roche) on a StepOne Plus machine (Applied Biosystems/Thermo Fisher Scientific) and sequenced on an Illumina NextSeq with Read 1 42 cycles, Read 2 42 cycles and Index 1 6 cycles. Adapters were trimmed using CutAdapt (Martin, M. et al. (2011), EMBnet.journal. 17, 10-12) and mapped to loci of interest using Bowtie2 (Langmead, B. et al. (2012), Nat. Methods. 9, 357-359). Filled reads were obtained and filled reads longer than 200 bp were visualized using a custom Python script.

### Ribonucleoprotein

[1172] RNPs were purified as described. 100 μL concentrated RNP was used as input. The above protocol was followed with the following modifications: 300 μL TRI reagent (Zymo) and 60 μL chloroform (Sigma Aldrich) were used for RNA extraction.

K. racemifer

[1173] Freeze-dried K. racemifer SOSP1-21 DSM 44963 was obtained from DSMZ (www.dsmz.de/collection/catalogue/details/culture/DSM-44963), resuspended in GYM Streptomyces media (4 g glucose, 10 g malt extract, 4 g yeast extract in 1 L water) and grown in a shaking incubator at 28 C. After 76 days, the culture was spun down, and the above protocol was followed with the following modifications: mechanical lysis using zirconia beads was performed with approximately 30 min of vortexing. Ribosomal RNA was removed using a NEBNext rRNA Depletion Kit (Bacteria) (NEB) as per the manufacturer's protocol and the rRNA-depleted sample was purified using Agencourt RNAClean XP beads (Beckman Coulter) prior to T4 PNK treatment. T4 PNK treatment was performed for 1.5 h and purified with an RNA Clean & Concentrator-5 kit (Zymo). Final PCR in the small RNA library prep contained 15 cycles.

I. tetrasporus

[1174] An agar slant of I. tetrasporus UTEX B 2012 was obtained from UTEX, inoculated in Modified Bold 3N Medium (UTEX) and grown at 20° C. in a shaking incubator with 12-hour light/dark cycles. After 18 days, the culture was spun down and the above protocol was followed with the following modifications: ribosomal RNA was removed using the manufacturer's protocol from the RiboMinus Transcriptome Isolation Kit for bacteria (Thermo Fisher Scientific) with probes from the RiboMinus Transcriptome Isolation Kit for bacteria, RiboMinus Plant Kit for RNA-seq and RiboMinus Eukaryote Kit for RNA-seq (all Thermo Fisher Scientific) combined in an equimolar ratio. Eluted RNA from ribosomal removal was concentrated using an RNA Clean & Concentrator-25 kit (Zymo) prior to T4 PNK treatment. Final PCR of the small RNA library prep contained 15 cycles.

### Cloning PAM TAM Libraries

[1175] Target sequences with 8N degenerate flanking sequences were synthesized by IDT and amplified by PCR with NEBNext High Fidelity 2× Master Mix (NEB). Backbone plasmid was digested with restriction enzymes (pACYC: EcoRV; pUC19: Eco88I and HindIII, Thermo Fisher Scientific) and treated with FastAP alkaline phosphatase (Thermo Fisher Scientific). The amplified library fragment was inserted into the backbone plasmid by Gibson assembly at 50° C. for 1 hour using 2× Gibson Assembly Master Mix (NEB) with an 8:1 molar ratio of insert:vector. The Gibson assembly reaction was then isopropanol precipitated by addition of an equal volume of isopropanol (Sigma Aldrich), final concentration of 50 mM NaCl, and 1 μL of GlycoBlue nucleic acid co-precipitant (Thermo Fisher Scientific). After a 15 min incubation at room temperature, the solution was spun down at max speed at 4° C. for 15 min, then the supernatant was pipetted off and the pelleted DNA was resuspended in 12 μL TE and incubated at 50° C. for 10 minutes to dissolve. 2 μL were then transformed by electroporation into Endura Electrocompetent E. coli (Lucigen) as per the manufacturer's instructions, recovered by shaking at 37° C. for 1 h, then plated across 5 22.7 cm×22.7 cm BioAssay plates with the appropriate antibiotic resistance. After 12-16 hours of growth at 37 C, cells were scraped from the plates and midi- or maxi-prepped using a NucleoBond Midi- or Maxi-prep kit (Machery Nagel).

E. coli PAM Screen

[1176] 100 ng each of a plasmid containing a locus of interest and a target 8N degenerate flanking library plasmid were transformed by electroporation into 30 μL Endura Electrocompetent E. coli (Lucigen) as per the manufacturer's protocol, with 3 biological replicates per locus of interest as well as 3 biological replicates of an empty control. After recovery by shaking at 37° C. for 1 hour, cells were plated across 1 22.7 cm×22.7 cm BioAssay plate with the appropriate antibiotic resistance and grown for 12-16 h at 37° C. Cells were scraped from the plate and mixed well, and 2 mL of the scraped cells were used as input to minipreps (Qiagen). 100 ng miniprepped plasmids were input to PCR to amplify the PAM-containing region with a 12-cycle PCR using NEBNext High Fidelity 2×PCR Master Mix (NEB) with an annealing temperature of 63° C., followed by a second 18-cycle round of PCR to further add Illumina adaptors and barcodes. Amplified libraries were gel extracted, quantified by a Qubit dsDNA HS assay (Thermo Fisher Scientific) and subject to single-end sequencing on an Illumina NextSeq with Read 1 75 cycles, Index 1 8 cycles and Index 2 8 cycles. PAMs were extracted and Weblogos depicting depleted PAMs were visualized using a custom Python script (Altae-Tran, H. et al. (2021).

### In Vitro Cleavage Assays

[1177] Double-stranded DNA (dsDNA) substrates were produced by PCR amplification of pUC19 plasmids containing the target sites and the TAM sequences. Cy3 and Cy5-conjugated DNA oligonucleotides (IDT) were used as primers to generate the labeled dsDNA substrates. Single-stranded DNA (ssDNA) substrates were ordered as Cy5.5-conjugated oligonucleotides (IDT). All ωRNA used in the biochemical assays was in vitro transcribed using the HiScribe T7 Quick High Yield RNA Synthesis kit (NEB) from the DNA templates purchased from Twist Biosciences. Target cleavage assays performed with AwaIscB contained 10 nM of DNA substrate, 1 μM of protein, and 4 μM of ωRNA in a final 1× reaction buffer of 20 mM HEPES pH 7.5, 50 mM NaCl, and 5 mM MgCl₂. Assays were allowed to proceed at 37° C. for 1 hour, then briefly shifted to 50° C. for 5 min, and immediately placed on ice to help relax the RNA structure prior to RNA digestion. Reactions were then treated with RNase A (Qiagen), and Proteinase K (NEB), and purified using a PCR cleanup kit (Qiagen). DNA was resolved by gel electrophoresis on Novex 10% TBE (dsDNA substrates), 6% TBE-Urea (dsDNA substrates), and 15% TBE-Urea (ssDNA substrates) polyacrylamide gels (Thermo Fisher Scientific). Target cleavage assays performed with CRISPR-associated IscB RNPs were performed similarly, except that 450 nM RNP replaced the protein and the ωRNA, and the reactions were incubated for 1.5 hours at 37° C. Cleaned reactions were then run on a 4% agarose E-gel (Thermo Fisher Scientific). Target cleavage assays with AmaTnpB were performed with 1 μM of protein, 3 μM of ωRNA and 10 nM substrate, purified as described, and visualized on 2% agarose E-gels (dsDNA substrates) or 10% TBE-Urea polyacrylamide gels (ssDNA substrates).

[1178] For kinetic analysis of AwaIscB or AmaTnpB activity, cleavage reactions were quenched with 11 mM of EDTA at each time point prior to cleanup. For screening metals, MgCl₂ was eliminated from the reaction buffer, while 2 mM of EDTA, and 7 mM of the indicated metal were added. Collateral cleavage assays for AwaIscB were performed using 10 nM of unlabeled ds/ssDNA substrate along with 10 nM of Cy5.5-labeled collateral ssDNA substrate, and the reactions were allowed to proceed for 3 hours at 37° C. Cleavage of the labeled nontargeted ssDNA was then assessed on a 15% TBE-Urea polyacrylamide gel. Collateral cleavage assays for AmaTnpB were performed with 10 nM of unlabeled ds/ssDNA substrate and 10 nM of Cy5.5-labeled collateral ssDNA substrate for 1 hour at 60° C. and the resulting cleavage was visualized on a 10% TBE-Urea gel.

[1179] Single-stranded RNA (ssRNA) substrates were in vitro transcribed and labeled with pCp-Cy5 (Jena Bioscience) on their 3′ end. For the 3′ end labeling, 50 pmol of ssRNA was incubated with 100 pmol of pCp-Cy5 and 50 U of T4 RNA ligase 1 (NEB) in 50 mM Tris pH 7.8, 10 mM MgCl₂, 10 mM DTT, 2 mM ATP, and 10% DMSO at 4° C. for 40 hours. Labeling reactions were quenched with 20 mM EDTA and purified using an RNA Clean and Concentrator-25 kit (Zymo). ssRNA cleavage assays were performed similarly to the DNA cleavage assays, quenched with 19 mM EDTA at the end of the reactions, treated with Proteinase K, and visualized on a 6% TBE-Urea polyacrylamide gel.

[1180] For all experiments, all conditions were performed at least twice for replicability.

### Cell-Free Transcription Translation TAM Screen

[1181] IscB protein sequences were human codon optimized using the GenScript codon optimization tool, and IscB genes, TnpB genes with endogenous codon optimization, and ωRNA scaffolds were synthesized by Twist Biosciences. Transcription/translation templates were generated by PCR from custom synthesis products. Cell-free transcription/translation reactions were carried out using a PURExpress In Vitro Protein Synthesis Kit (NEB) as per the manufacturer's protocol with half-volume reactions, using 75 ng of template for the protein of interest, 125 ng of template for the corresponding ωRNA with a guide targeting the TAM library and 25 ng of TAM library plasmid. Reactions were incubated at 37° C. for 4 hours, then quenched by placing at 4° C. or on ice and adding 10 ug RNase A (Qiagen) and 8 units Proteinase K (NEB) each followed by a 5 min incubation at 37° C. DNA was extracted by PCR purification and adaptors were ligated using an NEBNext Ultra II DNA Library Prep Kit for Illumina (NEB) using the NEBNext Adaptor for Illumina (NEB) as per the manufacturer's protocol. Following adaptor ligation, cleaved products were amplified specifically using one primer specific to the TAM library backbone and one primer specific to the NEBNext adaptor with a 12-cycle PCR using NEBNext High Fidelity 2×PCR Master Mix (NEB) with an annealing temperature of 63° C., followed by a second 18-cycle round of PCR to further add the Illumina i5 adaptor. Amplified libraries were gel extracted, quantified by qPCR using a KAPA Library Quantification Kit for Illumina (Roche) on a StepOne Plus machine (Applied Biosystems/Thermo Fisher Scientific) and subject to single-end sequencing on an Illumina MiSeq with Read 1 80 cycles, Index 1 8 cycles and Index 2 8 cycles. TAMs were extracted and enrichment score for each TAM was calculated by filtering for all TAMs present more than once and normalizing to the TAM frequency in the input library subject to the same in vitro transcription/translation and quenching reactions. A position weight matrix based on the enrichment score was generated and Weblogos were visualized based on this position weight matrix using a custom Python script (Altae-Tran, H. et al. (2021).

### Expression and Purification of KraIscB-1 RNP Complex

[1182] Purification of the KraIscB-1 in complex with the ncRNA of its native locus was performed similarly to the CRISPR-associated IscB-ncRNA RNP complex with the following modifications: (1) the KraIscB-1 CDS was not codon optimized; (2) co-expression with the ncRNA was performed in BL21(DE3) cells (NEB) in the presence of 100 μg/ml ampicillin, and 25 μg/ml kanamycin; (3) bdSENP1 protease was not used since KraIscB-1 protein was not attached to an N-terminal tag, but was only twin-strep tagged on its C-terminus. Once the boundaries of the co-purified RNA were defined by small RNA sequencing, the predicted ωRNA sequence was cloned downstream of a T7 promoter in a pCOLADuet-1 vector for inducible expression, and the KraIscB-1-ωRNA complexes were then prepared following the same procedure.

### Cell-Free Transcription Translation Cleavage Assays

[1183] ωRNA templates were amplified from custom synthesis products as described and in vitro transcribed using a HiScribe T7 Quick High Yield RNA Synthesis Kit (NEB) with 150 ng DNA template in 2 uL, 2 μL T7 RNA Polymerase Mix (NEB) and 6.67 mM final concentration each NTP in 30 μL total volume reactions and purified with an RNA Clean & Concentrator-25 kit (Zymo). Protein sequences were amplified from custom synthesis products or locus plasmid templates. To generate targets, short oligos containing target and PAM sequences with appropriate overhangs were synthesized by Genewiz and cloned into corresponding backbone plasmids by Golden Gate or restriction-ligation cloning. Dye-conjugated primers for generating labeled linear targets with dyes as annotated were synthesized by IDT and linear targets were amplified from target plasmids by PCR using Q5 Hot Start High Fidelity 2× Master Mix (NEB) as per the manufacturer's protocol.

[1184] Cell-free transcription/translation reactions were carried out using a PURExpress In Vitro Protein Synthesis Kit (NEB) as per the manufacturer's protocol with half-volume reactions using 75 ng of template for the protein of interest and a final concentration of 1 μM in vitro-transcribed ωRNA to cap the possible final RNP concentration. Reactions were incubated at 37° C. for 4 hours to allow for RNP formation, then placed on ice to quench in vitro transcription/translation. 50-100 ng of target substrate was then added and the reactions were incubated at the specified temperature for 1 additional hour. Reactions were then quenched by adding 10 ug RNase A (Qiagen) and 8 units Proteinase K (NEB) each followed by a 5 min incubation at 37° C. DNA was extracted by PCR purification and run on either 10% or 6% Novex TBE-Urea gels, or 10% Novex TBE gels (Thermo Fisher Scientific) as per the manufacturer's protocols, as specified in figures. Gels were stained with 1×SYBR Gold (Thermo Fisher Scientific) where specified for 10-15 min and imaged on a ChemiDoc imager (BioRad) with optimal exposure settings. Each condition was performed twice for replicability.

### Mammalian Cell Culture and Transfection

[1185] Mammalian cell culture experiments were performed in the HEK293FT line (American Type Culture Collection (ATCC)) grown in Dulbecco's Modified Eagle Medium with high glucose, sodium pyruvate, and GlutaMAX (Thermo Fisher), additionally supplemented with 1× penicillin-streptomycin (Thermo Fisher), 10 mM HEPES (Thermo Fisher), and 10% fetal bovine serum (VWR Seradigm). All cells were maintained at confluency below 80%.

[1186] All transfections were performed with Lipofectamine 2000 (Thermo Fisher). Cells were plated 16-20 hours prior to transfection to ensure 90% confluency at the time of transfection. For 96-well plates, cells were plated at 20,000 cells/well, and for 24-well plates, cells were plated at 100,000 cells/well. For each well on the plate, transfection plasmids were combined with OptiMEM I Reduced Serum Medium (Thermo Fisher) to a total of 25 μL. Separately, 23 μL of OptiMEM was combined with 2 μL of Lipofectamine 2000. Plasmid and Lipofectamine solutions were then combined and pipetted onto cells.

### Mammalian Lysate Cleavage Assays

[1187] Human codon-optimized IscB genes were cloned into a CMV expression backbone by Gibson assembly using 2× Gibson Assembly Master Mix (NEB) to generate pCMV-SV40 NLS-IscB protein-nucleoplasmin NLS-3×HA constructs. 500 ng each protein expression plasmid was transfected in a separate well of a 24-well plate as described. After approximately 48 hours, cells were washed with 500 μL of Dulbecco's phosphate buffered saline (Sigma Aldrich). 50 μL ice-cold lysis buffer (20 mM HEPES 7.5, 100 mM KCl, 5 mM MgCl₂, 0.1% Triton-X 100, 5% glycerol, 1 mM DTT, 1× cOmplete Protease Inhibitor Cocktail) was added, then cells were scraped from the plate, transferred to clean tubes and incubated on ice for 15 min. Cells were then sonicated in a cold water bath with amplitude 30 for 4 cycles of 10 s each. Lysate was then cleared by centrifugation at max speed for 20 min and supernatant was collected and either used fresh in assays or snap frozen in liquid nitrogen for later use. Labeled targets and in vitro-transcribed ωRNA was generated as described in “Cell-free transcription/translation cleavage assays” above.

[1188] To perform cleavage assays, 10 μL cell lysate was incubated with 1 μg in vitro-transcribed ωRNA or sgRNA, or no RNA for negative controls, and 100 ng target substrate in 1×NEBuffer 3.1 (NEB). Reactions were incubated at 37° C. for 1 hour, then quenched by adding 10 ug RNase A (Qiagen) and 8 units Proteinase K (NEB) each followed by a 5 min incubation at 37° C. DNA was extracted by PCR purification and run on a 4% Agarose E-gel EX (Thermo Fisher Scientific) as per the manufacturer's instructions and visualized on a ChemiDoc imager (BioRad).

Expression and purification of AwaIscB

[1189] The human codon optimized AwaIscB protein was expressed from a pET45b(+) plasmid backbone, with a His14-bdSUMO tag attached to its N-terminus, and a twin-strep tag attached to its C-terminus. Rosetta(DE3)pLysS cells transformed with the expression construct were grown at 37° C. in the terrific broth (TB) medium supplemented with 100 μg/ml ampicillin, and 34 μg/ml chloramphenicol, and shifted to 18° C. at an OD600 of 0.3. Protein production was induced after reaching an OD600 of 0.6-0.8 with 0.2 mM IPTG and continued at 18° C. for 16-18 hours. Cells were harvested by centrifugation, and resuspended in lysis buffer (50 mM Tris pH 8, 1 M NaCl, 5% glycerol, 5 mM MgCl₂, 40 mM imidazole, and 5 mM 0-mercaptoethanol) supplemented with benzonase (Sigma), and protease inhibitors (PMSF and Roche cOmplete, EDTA-free), and then lysed by two passes with a high-pressure homogenizer (LM20 Microfluidizer, Microfluidics). After clearing the lysate by centrifugation, the soluble fraction was bound to Ni-Sepharose 6 Fast Flow resin (GE Healthcare). The Ni beads were first washed with lysis buffer, then briefly with buffer C (50 mM Tris pH 8, 2 M NaCl, 5% glycerol, 5 mM MgCl₂, 40 mM imidazole, and 5 mM β-mercaptoethanol), and buffer D (50 mM Tris pH 8, 500 mM NaCl, 5% glycerol, 5 mM MgCl₂, 40 mM imidazole, and 5 mM 0-mercaptoethanol). The AwaIscB protein was then eluted in elution buffer (buffer D containing 300 mM imidazole), and dialyzed overnight against buffer E (20 mM Tris pH 8, 500 mM NaCl, 5% glycerol, 5 mM MgCl₂, and 0.5 mM TCEP). Following dialysis, the protein was purified through a HiTrap Heparin HP column against a gradient of 0.25-2 M NaCl. Afterwards, peak fractions containing AwaIscB were pooled and dialyzed overnight once against buffer E. Protein was concentrated up to 1.5-2 mg/ml, aliquoted, snap-frozen, and stored at −80° C.

### Sequencing of Cleavage Products

[1190] In vitro cleavage assays were performed as described. Purified reactions were subjected to a GLOE-seq library preparation protocol (Sriramachandran, A. et al. (2020), Mol. Cell. 78, 975-985.e7) as described using 2.5 μM adapter as input to the proximal adapter annealing step. The final amplification to add Illumina adapters and barcodes was performed with NEBNext High Fidelity 2×PCR Master Mix (NEB) with an annealing temperature of 63° C. for 15 s and 12 cycles. Libraries were subjected to paired-end sequencing using an Illumina MiSeq with Read 1 150 cycles, Read 2 150 cycles, Index 1 8 cycles and Index 2 8 cycles. Paired-end reads were mapped to the target substrate using BWA and 3′ ends were extracted and plotted using a custom Python script.

### Enzymatic Footprinting Assay

[1191] dsDNA substrate (191 bp) was produced by PCR amplification from a plasmid containing the target site and the TAM sequence. 10 pmol of dAwaIscB and 40 pmol of ωRNA were incubated in reaction buffer (20 mM HEPES pH 7.5, 50 mM NaCl, 10 mM MgCl₂, and 5% glycerol) at 37° C. for 30 min. Then, 0.1 pmol of DNA substrate was added and the reaction was allowed to proceed for another 30 min at 37° C. Next, 500 U of Exonuclease III (NEB) was added, the assay was incubated for an additional 10 min at 37° C. and quenched with 20 mM EDTA. As negative control, another reaction was run in parallel, in which ωRNA was excluded and the volume was replaced with water. After quenching, both reactions were briefly shifted to 50° C. for 5 min, then immediately placed on ice, treated with RNase A (Qiagen), and Proteinase K (NEB), and purified using a PCR cleanup kit (Qiagen). Purified reactions were subjected to a GLOE-seq library preparation protocol (Sriramachandran, A. et al. (2020), Mol. Cell. 78, 975-985.e7) as described using 2.5 μM adapter as input to both the proximal and distal adapter annealing steps. Libraries were amplified as described in the “Sequencing of cleavage products” section above and subjected to paired-end sequencing using an Illumina MiSeq with Read 1 100 cycles, Read 2 100 cycles, Index 1 8 cycles and Index 2 8 cycles. Paired-end reads were mapped to the target substrate using BWA and 3′ ends were extracted and plotted using a custom Python script (Altae-Tran, H. et al. (2021), Zenodo (2021).

### Mammalian Genome Editing

[1192] ωRNA scaffold backbones were cloned into a pUC19-based human U6 expression backbone by Gibson Assembly. For initial testing, 12-guide libraries were cloned in a pool mixing primers to add each of the 12 guides in in a given pool at equimolar ratios, and ωRNA scaffold backbones were subject to whole plasmid amplification with guide primers annealing to the U6 promoter and a second primer annealing to the start of the ωRNA scaffold using Phusion Flash High-Fidelity 2× Master Mix (Thermo Fisher Scientific). PCR products were gel extracted and eluted in 30 μL, then blunt-end ligated to circularize by addition of 5 units T4 PNK (NEB), 200 units T4 DNA Ligase (NEB) and final 1×T4 DNA Ligase Buffer (NEB) and incubation for 1.5 h at room temperature prior to transformation in Stbl3 chemically competent E. coli (NEB). For individual guide constructs, oligos with appropriate overhangs were synthesized by Genewiz, annealed and phosphorylated using T4 PNK (NEB) and cloned into ωRNA backbones by restriction-ligation cloning. Protein expression constructs were cloned as described in “Mammalian lysate cleavage assays” above.

[1193] Prior to testing individual guides, each tested IscB protein was screened for activity in HEK293FT using a pool of 12 guides cloned as described. This was done to more rapidly assess many guides for a given protein for a broader survey of possible guides, as Applicants had no prior knowledge of the effect of guide properties such as sequence or genomic location may affect the ability of IscB to generate indels in eukaryotic cells. For this 12-guide pooled initial screening of IscB proteins, 800 ng protein expression construct and 1200 ng of the corresponding guide pool with corresponding ωRNA scaffold were transfected in one well of a 24-well plate as described. After 60-72 hours, genomic DNA was harvested by washing the cells once in 1×DPBS (Sigma Aldrich) and dry trypsinizing cells using TrypLE (Thermo Fisher Scientific). Trypsinized cells were collected in 1 mL 1×DPBS and pelleted by centrifugation at 300×g at 4° C. for 5 min. The supernatant was removed and cells were resuspended in 50 μL QuickExtract DNA Extraction Solution (Lucigen) and cycled at 65° C. for 15 min, 68° C. for 15 min then 95° C. for 10 min to lyse cells. 2.5 μL of lysed cells were used as input into each PCR reaction. Amplification of each region targeted by a guide in a given guide pool was performed individually. Insertion/deletion (indel) frequency was analyzed using CRISPResso2 (Clement, K. et al. (2019), Nat. Biotechnol. 37, 224-226). Given the low frequency of indel events with IscBs, in order to eliminate noise from PCR and sequencing error, only indels with at least 2 reads or more than 1 base inserted or deleted were counted towards reported indel frequencies. The allele frequency table generated by CRISPResso2 was used for manual verification of indels (i.e. both insertions and deletions occurring, occurrence of insertions and deletions of diverse sizes, not occurring in homonucleotide stretches), to determine if computed indels were due to PCR or sequencing error given that putative detected indels often occurred at frequencies similar to the detection threshold based on the number of cells input used in the experiment and the number of reads obtained from sequencing. Indel quantification results from the 12-guide pools are available in Table 11. Guides with manually verified indels from this pooled screen were assessed individually to validate indel formation as described below.

[1194] For individual guide sequences, 250 ng guide/ωRNA expression plasmid and 125 ng protein expression plasmid were transfected in each of 4 wells as biological replicates in a 96-well plate for each guide condition as described. After 60-72 hours, genomic DNA was harvested by washing the cells once in 1×DPBS (Sigma Aldrich) and adding 50 μL QuickExtract DNA Extraction Solution (Lucigen). Cells were scraped from the plates to suspend in QuickExtract and cycled at 65° C. for 15 min, 68° C. for 15 min then 95° C. for 10 min to lyse cells. 2.5 μL of lysed cells were used as input into each PCR reaction.

[1195] For library amplification, target genomic regions were amplified and with a 12-cycle PCR using NEBNext High Fidelity 2×PCR Master Mix (NEB) with an annealing temperature of 63° C. for 15 s, followed by a second 18-cycle round of PCR to add Illumina adapters and barcodes. The libraries were gel extracted and subject to single-end sequencing on an Illumina MiSeq with Read 1 300 cycles, Index 1 8 cycles, Index 2 8 cycles. Insertion/deletion (indel) frequency was analyzed using CRISPResso2 (Clement, K. et al. (2019), Nat. Biotechnol. 37, 224-226) as described. For individual guide/ωRNA experiments, to assess statistical significance, 2-tailed T-tests were performed using non-targeting guide/ωRNA conditions as a negative control (see Table 11).

I. tetrasporus Shotgun Sequencing

[1196] An agar slant of I. tetrasporus UTEX B 2012 was obtained from UTEX inoculated in Modified Bold 3N Medium (UTEX) and grown at 20° C. in a shaking incubator with 12 hour light/dark cycles. After 14 days, cultures were spun down and DNA was extracted using a DNeasy Plant Mini kit (Qiagen). Total DNA was tagmented using Tn5 and tagmentation reactions were quenched by addition of Buffer PB (Qiagen) and PCR purified. 10 μL purified DNA was used as input to PCR using 2×KOD HotStart Master Mix (Millipore Sigma) as per the manufacturer's instructions with an annealing temperature of 60° C. and 30 cycles to add Illumina adapters. Amplified libraries were gel extracted, quantified by qPCR using a KAPA Library Quantification Kit for Illumina (Roche) on a StepOne Plus machine (Applied Biosystems/Thermo Fisher Scientific) and subject to paired-end sequencing on an Illumina NextSeq with Read 1 150 cycles, Read 2 150 cycles, Index 1 8 cycles and Index 2 8 cycles. SPAdes-3.15.2 was used with the “isolate” option and kmer lengths of 21, 33, 55, 67 to create a contig level assembly from the reads (Bankevich, A. et al. (2012), J. Comput. Biol. 19, 455-477). BLASTn was then used to compare the final contigs containing ChlorIscB and IscB fragments with the published UTEX B 2012 chloroplast genome (GenBank accession KY407659.1) (Turmel, M. et al. (2017), Sci. Rep. 7, 994).

### Expression and Purification of TnpB Proteins

[1197] To purify the A. lobatus TnpB-2 protein in complex with the putative ωRNA of its native locus, an N-terminally His14-MBP tagged TnpB CDS and the corresponding downstream locus up to 80 bp beyond the end of predicted guide adaptor were cloned as a single piece downstream of a T7 promoter in a pET45b(+) vector. The AloTnpB-2 RNP was expressed and purified similarly to the CRISPR-associated IscB RNPs with the following modifications: (1) the lysis buffer, and the buffers A and B were supplemented with 40 mM imidazole, and 5 mM β-mercaptoethanol, while MgCl₂ and DTT in all of the buffers were eliminated; (2) the RNP was purified on Ni-Sepharose 6 Fast Flow beads (GE Healthcare) instead of the Strep-Tactin resin; the elution buffer was supplemented with 300 mM imidazole and 5 mM β-mercaptoethanol, while MgCl₂, DTT and desthiobiotin were eliminated; (4) the His14-MBP solubility tag was kept attached to the RNP to provide stability.

[1198] To purify the A. macrosporangiidus TnpB, the native sequence was expressed from a pET45b(+) plasmid backbone, with a His14-MBP tag attached to its N-terminus via a TEV protease cleavage site. The AmaTnpB was expressed and purified similarly to AwaIscB with the following modifications: (1) expression was performed in BL21(DE3) cells (NEB) in the presence of 100 μg/ml ampicillin; (2) MgCl₂ was omitted from buffers C, D and E and the elution buffer; (3) TEV protease was added to the dialysis for solubility tag cleavage; (4) following dialysis, the protein was purified through a Resource S column against a gradient of 0.2-2M NaCl; (5) protein was concentrated up to 5 μM.

### Supplementary Text

### Extended Discussion of Hybrid CRISPR ωRNA and ωRNA Secondary Structure Analysis

[1199] Comparing the CRISPR-associated IscB ncRNA and ωRNA covariance model-based secondary structure predictions (FIG. 9G), Applicants found that all 10 base positions that were more than 97% conserved in the ωRNA were also highly conserved in the CRISPR-associated IscB ncRNA. Both the ωRNA and CRISPR-associated ncRNA contain a short 3-4 bp nexus, a conserved nexus hairpin, and a large region consisting of two interconnected multi-stem loops. The ωRNA additionally contains a hairpin that encompasses a Shine-Dalgarno (SD) sequence located approximately 10 bp upstream of the CDS start codon, implying that the ωRNA might be involved in the regulation of the translation of IscB. A statistically significant pseudoknot structure was predicted to exist in the ωRNA between the loop of one hairpin in the multi-stem loop region and the region directly downstream of the nexus, which Applicants termed the nexus pseudoknot hairpin (FIG. 9G). Examination of individual CRISPR-associated ncRNA sequences suggested the presence of a homologous pseudoknot structure (FIG. 9G inset). Scrambling the sequences found in the pseudoknot of the ncRNA disrupting the structure abolished the cleavage activity of the CRISPR-associated IscB. However, mutating the pseudoknot sequence while maintaining base pairing had no effect on cleavage activity, suggesting that the pseudoknot structure, but not necessarily sequence, was important for ncRNA function (FIG. 47).

[1200] The majority of iscBs are associated with predicted ωRNA scaffolds matching the structure of the covariance model shown in FIG. 15B, but several large groups are not. To explore the diversity of the possible ωRNA scaffolds, Applicants iteratively built a set of profiles that span all major groups of ωRNAs associated with iscBs and isrBs, and found that different iscB/isrB clades were associated with structurally distinct ωRNAs (FIG. 31C). The structures differed by the number of hairpins in the multi-stem loop and guide adaptor regions, but the nexus pseudoknot was present in all major iscB- and isrB-associated ωRNAs. The IsrB ωRNAs additionally contained a second conserved pseudoknot between the guide adapter and a hairpin loop in the multi-stem loop region. Two of the three main IsrB ωRNA structures contained a third hairpin in the multi-stem loop region that forms the pseudoknot with the guide adaptor.

[1201] This guide adaptor pseudoknot was unique to IsrB ωRNAs and appears to have been lost contemporaneously with the insertion of the HNH domain (FIG. 41A-C).

### Extended Phylogenetic Analysis and Discussion

[1202] To assess the robustness of our phylogenetic analyses and interpretations, Applicants describe in this section the additional analyses Applicants performed and the reasoning behind our phylogenetic conclusions.

[1203] To obtain maximally robust trees, Applicants used modified parameters for tree inference software. For all IQ-Tree 2 inferred trees, 5000 ultrafast bootstraps were performed with the bnni option to help reduce the impact of severe model violations on bootstrap support values (Hoang, D. et al. (2018), Mol. Biol. Evol. 35, 518-522).

[1204] Under this option, individual bootstrap trees are optimized using nearest neighbor exchange with hill-climbing on the likelihood function based on the bootstrap alignment. To improve the optimization performance of IQ-Tree 2 relative to default parameters, Applicants used nstop=500 (500 iterations of no improvement before terminating), with ninit=500 (500 initial trees), ntop=100 (100 top trees retained), and nbest=20 (20 best trees retained throughout the search and iteratively improved upon). For RA×ML, Applicant used 2000 rapid bootstraps for each tree to obtain accurate bootstrap values. For MrBayes, Applicants typically used 8-16 chains with a temperature difference between 0.01 and 0.025. Applicants also used 4-8 (resources permitting) independent runs to obtain a better estimate of convergence. Due to the occurrence of numerical overflow in MrBayes when computing likelihoods with a large number of taxa, Applicants employed a reaper script to restart from the last checkpoint when a numerical overflow was detected in any of the chains during the runs.

[1205] Applicants analyzed multiple different alignments to ensure robustness of the phylogenetic conclusions. Focusing the alignments only on the core, highly conserved regions containing the catalytic sites provided for comparison of IscB, IsrB, and Cas9s, proteins that widely differ in size and domain composition. Furthermore, analysis of slowly evolving regions enables phylogenetic inferences to be made over long evolutionary larger timescales that encompass the evolution of entire protein families, such as IscB and Cas9. The presence of multiple decaying, inactivated variants of IscB, IsrB, and Cas9 with high sequence divergence from active forms rendered long branch attraction a potential issue (Lockhart, P. et al. (1996), Proc. Natl. Acad. Sci. U.S.A 93, 1930-1934). Therefore, all inactivated proteins were removed from the RuvC/BH and RuvC/BH/HNH alignments to ensure the phylogeny tracked the evolution of active nucleases with the maximum possible accuracy, avoiding the artifacts caused by mixing active and inactive nucleases that evolve with substantially different rates. The evolution of Cas9 from IscB through the intermediate CRISPR-associated IscB cluster 2089 was supported by all inferred trees, and the evolution of IscB from IsrB is also strongly supported. However, to ensure robustness of these interpretations, Applicants considered numerous phylogenetic parameters, compared Bayesian and maximum likelihood methods, and also assessed the effect of taxa sampling (FIGS. 22, 35C-D, 52-53, 54A-B).

[1206] Next, Applicants tested whether the main assumptions of phylogenetic inference held for the alignments used for our phylogenetic analyses. In some cases, the stationarity condition did not hold for the default alignment, prompting additional modifications to reduce the extent of stationarity violation. The stationarity violations detected for RuvC/BH/HNH alignments were mostly resolved by removing Cas9s of subtype II-B (prompted by the unstable placement of the major II-B Cas9 clade in the phylogenetic trees) and were completely eliminated by removing all Cas9s except for the earliest forms that evolved from IscB. This improvement in the tree quality suggests different evolutionary regimes for the core regions of IscB/IsrB (the RuvC, BH, and HNH domains) are substantially different in IscB/IsrBs and the homologous regions of the late, specialized Cas9s (II-B, II-C, tnpA-associated II-C, and the majority of II-A). Such a difference in evolutionary pressures is likely to stem from the shift in biological functionality between Ω systems (IscB/IsrB) and CRISPR-Cas systems (Cas9). Applicants performed additional phylogenetic analyses using these two modified alignments in order to assess the consistency of the inferences. The origin of Cas9 from the IscB cluster 2089 was consistently reproduced in these analyses (FIGS. 32-33, 35, 54A,C, 56).

[1207] Due to the removal of clusters that included inactivated nucleases, some CRISPR-associated IscBs were removed. For experimental characterization, Applicants considered all CRISPR-associated clusters regardless of whether or not they were included in the main phylogenetic analyses. In particular, IscB cluster 34507 contained mostly inactivated variants. Applicants studied IscBs from this cluster experimentally, reasoning that the high level of inactivation implies that the active members of this cluster are likely to have a high level of activity that could render them toxic to the host cell resulting in selection driving inactivation. To determine the likely position of this cluster in the full phylogenetic tree, Applicants performed an additional phylogenetic analysis of full IscB proteins (excluding the C-termini that aligned poorly). Applicants found that the experimentally studied CRISPR associated IscBs belonged to a small clade of CRISPR-associated IscBs that includes 4 non-redundant, CRISPR-associated loci. This analysis also yielded additional information on the relationship between IscB and Cas9. Because the alignment used for this analysis consisted of all IscBs and Cas9_1261 and Cas9_665 (two previously identified early Cas9 clusters from II-D), Applicants were able to construct a MAFFT-einsi alignment that spanned the entire length of these proteins (except for the C-terminal and the PLMP domain that is missing in Cas9). The phylogenetic analysis based on this alignment incorporated information from all homologous regions of IscB and Cas9 rather than the core region only. Clusters lacking coverage to any of the catalytic domains were removed; however, clusters including inactive nucleases were retained in the analysis. Positions in the alignment with more than 75% gaps were removed, and the tree was inferred using IQ-Tree 2 with the modified parameters described above. The exclusion of additional Cas9s in this analysis could potentially skew the placement of the Cas9 family. Nevertheless, the resulting tree supported CRISPR-associated IscB cluster 2089 as the ancestor of Cas9 (FIG. 56).

[1208] Phylogenetic symmetry tests showed that the main RuvC/BH/HNH alignment that included all Cas9s and IscBs likely violated the stationarity condition used by most phylogenetic methods (SRH conditions). Similarly, phylogenetic symmetry tests show that the high resolution (individual proteins as opposed to cluster representatives) codon DNA sequence alignment of early cas9s also likely violates the stationarity condition. Applicants considered a number of methods to assess the validity of the phylogenetic trees inferred using these alignments. For the early Cas9 tree, Applicants compared the tree inferred from the amino acid sequence (IQ-Tree 2, WAG+F+I+G4 model) (FIG. 32A) to the tree inferred from the underlying DNA codon sequences (GTR+G4) (FIG. 33A). The two trees were closely congruent with respect to the transition from IscB to Cas9 although despite the DNA tree inference only involved the simple GTR substitution model that does not take codon level information into account (FIGS. 32A, 33A).

[1209] To assess the generalizability of the phylogenetic conclusions, in addition to bootstrap analyses in all ML trees, Applicants also performed a sensitivity analysis of the RuvC/BH/HNH phylogenetic inferences. Specifically, Applicants considered the effect of random exclusion of taxa. To this end, Applicants explored a range of taxa dropout rates. For each dropout rate, r, Applicants selected 1000/(1−r) alignments with r taxa randomly dropped out. Because Applicants were interested predominantly in the topology surrounding early Cas9 evolution, Applicants ensured that IscB cluster 2089 (putative Cas9 modern ancestor) and early Cas9 clusters (Cas9_1261, Cas9_665, Cas9_1079, Cas9_849) were retained in every alignment. Applicants then obtained inference for each of these taxon subsampled alignments. All trees were rooted on the clade of IscBs considered to be ancestral, that is evolved from IsrB, as inferred from the RuvC/BH tree. Next, various features (such as percentage of trees where Cas9 is monophyletic) were summarized across all trees for each dropout rate (FIG. 35). Error bars (95% confidence intervals) for the estimates were computed using 2000 bootstraps over the tree samples. Due to the computationally intense nature of ML inference for alignments with many taxa, Applicants limited this dropout analysis to FastTree2 (as opposed to IQ-Tree 2) based phylogenetic inference. The results of this analysis supported that Cas9_1261, Cas9_665 were the oldest Cas9 groups, and that all Cas9s likely originated from the ancestors of these two clusters. Moreover, the tree supported that even with taxon dropout rates of up to 50%, most of the resulting trees supported the CRISPR-associated IscB cluster 2089 as the ancestor to all extant Cas9s.

[1210] Applicants next considered whether or not the coarse graining of proteins (specifically the use of cluster representatives), as opposed to including all non-redundant sequences (at 90% redundancy), affected the phylogenetic inference. Applicants curated two “high resolution” alignments consisting of all non-redundant proteins of interest (Cas9/IscB) from clusters related to the early evolution of Cas9. One version of this alignment consisted of full protein alignments (using MAFFT-einsi) with the REC domains and PLMP domains removed. Positions with 75% or more gaps were removed. Another alignment consisted of translation aligned DNA codons for the ORFs, again removing REC domains and PLMP domains. Highly gapped codons triplet positions (sets of 3 positions) were removed using BMGE (Criscuolo, A. et al. (2010), BMC Evol. Biol. 10, 210). The resulting alignments were analyzed using IQ-Tree 2 and MrBayes. As the DNA alignment suffered from severe violation of the stationarity requirement for phylogenetic analysis, Applicants considered further using heterotachy models to account for changing modes of evolution throughout the underlying evolutionary tree. Adding a heterotachy-aware model did not change the inferred sequence of events in the evolution of early Cas9 from IscB (FIG. 33B). Phylogenetic analyses of the DNA sequences were agnostic to codons. Nevertheless, the two sets of alignments produced closely similar topologies for early events in Cas9 evolution. These topologies further agreed with previously identified topologies inferred using coarse grained clusters, suggesting that clustering was not detrimental to the inference of phylogenies.

[1211] Comparison of IscB/IsrB ωRNA phylogeny to the protein phylogenies can be useful for identifying co-evolution, and potentially could provide more information regarding the ancestry of Cas9. However, the structural motifs differed across the diversity of ωRNAs. Therefore, the main large-scale phylogenetic analysis across IscB/IsrB ωRNAs used a non-structured nucleotide alignment of representative ωRNAs that was produced using MAFFT-ginsi. Because the nexus pseudoknot is conserved in almost all ωRNAs, greater emphasis was given to this region by removing all sequences with low coverage to the nexus pseudoknot. An IQ-Tree 2 ML inference showed that IscB ωRNAs are a deep branch in the tree of ωRNAs, suggesting that IscB ωRNAs evolved on a single occasion from IsrB ωRNAs (FIG. 55A). Due to the high diversity of ωRNAs, the early Cas9_1261 and Cas9_665 tracrRNAs could not be included in the analysis for accurate placement because as the alignment across all RNAs failed to capture sufficient global sequence conservation. CMsearch of two tracrRNAs from early Cas9s (Cas9_1261 and Cas9_665) yielded significant hits to the G1a ωRNA profile (E-values 3.7e-8, 4.1e-8 respectively), suggesting that at least part of the tracrRNA in early Cas9 systems originated from the IscB ωRNA (FIG. 36). The likely evolutionary link between ωRNAs and tracrRNAs further suggests that Cas9 evolved from IscB. To further address the question of whether or not early Cas9 tracrRNAs were derived from ωRNAs, Applicants constructed an accurate MAFFT-ginsi alignment of the early Cas9 tracrRNAs along with 25 closely related IscB ωRNAs, including the hybrid CRISPR/ωRNA from IscB cluster 2089. To account for the discrepancy between tracrRNAs and ωRNAs, Applicants concatenated the DR of the corresponding CRISPRs to the tracrRNA with a 4 bp poly-A tetraloop joining the two. Applicants performed a Bayesian phylogenetic analysis to address potential issues with the smaller number of taxa in this analysis. Applicants found that the combined DR/tracrRNAs likely evolved from IscB (2089) like ωRNAs, with high posterior probability (branch posterior 89%±1%, FIG. 55C). This result further suggests that all Cas9s evolved from the CRISPR-associated IscB cluster 2089.

[1212] Additional evidence from protein or RNA alignment comparisons were also useful in identifying the most likely ancestor of Cas9. On the sequence level, the Cas9_1261 and Cas9_665 representative sequences are more similar to the IscB cluster 2089 representative sequence in the split RuvC and HNH domains compared to other example IscBs (FIG. 35). Moreover, the N-terminus of Cas9_1261 potentially contains fragments of the PLMP domain that is characteristic of IscB, suggesting that the PLMP domain gradually degraded during the transition to Cas9. Lastly, the 5′ end of the DRs from CRISPR-associated IscB cluster 2089 is closely similar to the 5′-terminal sequences of the DRs from Cas9_1261 and Cas9_665, suggesting further homology. All of these observations, in addition to the phylogenetic analyses, strongly suggest that CRISPR-associated IscB cluster 2089 is the ancestor of the earliest Cas9s. Accordingly, the sequence of events in the evolution of Cas9 was, first, the association of CRISPR arrays with IscB, either through duplication of the 5′ of the ωRNA or by insertion of the ωRNA into a CRISPR array. Then, REC-like sequences were inserted between the BH and RuvC-II, or possibly inside the BH, splitting it into two domains, the second of which remains in some early Cas9s. Then, the PLMP domain degraded from the lengthened IscB protein becoming Cas9, which subsequently became associated with the CRISPR adaptation module. Given the rarity of the early Cas9s, such as Subtype II-D, compared to IscB and other Cas9 subtypes, it appears likely that these systems containing small, simply organized Cas9s were outcompeted by the subsequently evolved, more efficient, larger Cas9s. From our phylogenetic analyses, the most likely candidate set of adaptation genes that became associated with Cas9 at first included Cas1, Cas2, and Cas4 genes. The association with Cas4 was then likely lost, forming Type II-C Cas9s, which subsequently gained additional associations to become II-A (associated with Csn2), II-B (re-association with Cas4), and tnpA-associated II-C (re-associated with Y1 recombinases).

### Extended Discussion of Potential Biological Functions of IS200/605 Endonucleases.

[1213] The biological functions of Ω systems remain unknown, but several hypotheses appear to be compatible with available evidence.

[1214] First, IscB, IsrB, and TnpB could mediate RNA-guided TnpA-catalyzed transposition while suppressing transposition independent of ωRNA. Our phylogenomic analysis together with previous observations (Kapitonov, V. et al. (2015), J. Bacteriol. 198, 797-807) indicate that iscB, isrB, and a subfamily of cas9 have all associated with the Y1 transposase tnpA of IS200/IS605 transposons on multiple, independent occasions (FIG. 31A) (Kapitonov, V. et al. (2015), J Bacteriol. 198, 797-807). Moreover, the iscB, isrB and tnpB genes themselves are embedded in non-autonomous transposons of the IS200/IS605 superfamily. Integration events of ωRNA-containing transposons have been observed in locations with an ATGA or GTGA 3′ flanking sequences (Weinberg, Z. (2009), Nature 462, 656-659), which is a common TAM sequence for IscB proteins (FIG. 48). Many IscB TAMs contain start and stop codons, such that IscB targeting could mediate transposon insertion at the beginning or end of operons, allowing the transposon to exploit existing transcription initiation and termination signals. Together, these observations suggest the possibility that IscB, IsrB and TnpB are functionally analogous to CRISPR-associated transposases (CAST complexes) (Strecker, J. et al. (2019), Science 365, 48-53; Klompe, S. et al. (2019), Nature 571, 219-225), which mediate RNA-guided transposition of Tn7-like transposons. However, in contrast to CAST effectors such as Cas12k, an inactivated TnpB derivative (Strecker, J. et al. (2019), Science 365, 48-53), the great majority of IscB, IsrB and TnpB are predicted to be active nucleases. The role of the nuclease activity of these proteins in RNA-guided transposition (if any) remains to be studied experimentally. One possibility is that these nucleases eliminate aberrant DNA structures emerging upon RNA-guided transposon insertion.

[1215] An orthogonal hypothesis is that these nucleases, together with the ωRNA, are a distinct variety of toxins, to which TnpA is the antitoxin. Such toxins would kill cells lacking the inserted IS200/605 locus, thus making the host addicted to the IS200/605 transposase and ensuring that the non-autonomous transposons encoding IscB/TnpB also maintain their transposition capacity.

[1216] In addition to its direct role in transposition, TnpA might function to acquire guides for Q systems, analogously to the Cas1 protein that is thought to have evolved from the transposase of the casposons, a distinct class of self-synthesizing transposons (Krupovic, M. et al. (2014), BMC Biol. 12, 1-12). The high sequence identity between the ωRNA transposon end-overlapping regions in both iscB and tnpB loci in K. racemifer suggests that, at least in this bacterium, some IscBs and TnpBs share a mechanism for acquiring guide sequences. More generally, loci encoding complete Ω systems or standalone ωRNAs could be mobilized and moved to new locations by TnpA, thereby associating with new, diverse flanking sequences that become guides.

### REFERENCES FOR EXTENDED DISCUSSION OF SUPPLEMENTAL MATERIALS

[1217] 1. F. Zhang, Development of CRISPR-Cas systems for genome editing and beyond. Quarterly Reviews of Biophysics. 52 (2019).
[1218] 2. F. Hille, H. Richter, S. P. Wong, M. Bratovie, S. Ressel, E. Charpentier, The biology of CRISPR-Cas: Backward and forward. Cell. 172, 1239-1259 (2018).
[1219] 3. V. V. Kapitonov, K. S. Makarova, E. V. Koonin, ISC, a novel group of bacterial and Archaeal DNA transposons that encode Cas9 homologs. J Bacteriol. 198, 797-807 (2015).
[1220] 4. P. Siguier, E. Gourbeyre, M. Chandler, Bacterial insertion sequences: their genomic impact and diversity. FEMS Microbiol. Rev. 38, 865-891 (2014).
[1221] 5. S. Shmakov, A. Smargon, D. Scott, D. Cox, N. Pyzocha, W. Yan, O. O. Abudayyeh, J. S. Gootenberg, K. S. Makarova, Y. I. Wolf, K. Severinov, F. Zhang, E. V. Koonin, Diversity and evolution of class 2 CRISPR-Cas systems. Nat. Rev. Microbiol. 15, 169-182 (2017).
[1222] 6. B. Zetsche, J. S. Gootenberg, O. O. Abudayyeh, I. M. Slaymaker, K. S. Makarova, P. Essletzbichler, S. E. Volz, J. Joung, J. van der Oost, A. Regev, E. V. Koonin, F. Zhang, Cpfl is a single RNA-guided endonuclease of a class 2 CRISPR-Cas system. Cell. 163, 759-771 (2015).
[1223] 7. E. Deltcheva, K. Chylinski, C. M. Sharma, K. Gonzales, Y. Chao, Z. A. Pirzada, M. R. Eckert, J. Vogel, E. Charpentier, CRISPR RNA maturation by trans-encoded small RNA and host factor RNase III. Nature. 471, 602-607 (2011).
[1224] 8. I. Kalvari, E. P. Nawrocki, N. Ontiveros-Palacios, J. Argasinska, K. Lamkiewicz, M. Marz, S. Griffiths-Jones, C. Toffano-Nioche, D. Gautheret, Z. Weinberg, E. Rivas, S. R. Eddy, R. D. Finn, A. Bateman, A. I. Petrov, Rfam 14: expanded coverage of metagenomic, viral and microRNA families. Nucleic Acids Res. 49, D192-D200 (2021).
[1225] 9. Z. Weinberg, J. Perreault, M. M. Meyer, R. R. Breaker, Exceptional structured noncoding RNAs revealed by bacterial metagenome analysis. Nature. 462, 656-659 (2009).
[1226] 10. M. Jinek, K. Chylinski, I. Fonfara, M. Hauer, J. A. Doudna, E. Charpentier, A programmable dual-RNA-guided DNA endonuclease in adaptive bacterial immunity. Science. 337, 816-821 (2012).
[1227] 11. G. Gasiunas, R. Barrangou, P. Horvath, V. Siksnys, Cas9-crRNA ribonucleoprotein complex mediates specific DNA cleavage for adaptive immunity in bacteria. Proc. Natl. Acad. Sci. U.S.A 109, E2579-86 (2012).
[1228] 12. G. Gasiunas, J. K. Young, T. Karvelis, D. Kazlauskas, T. Urbaitis, M. Jasnauskaite, M. M. Grusyte, S. Paulraj, P.-H. Wang, Z. Hou, S. K. Dooley, M. Cigan, C. Alarcon, N. D. Chilcoat, G. Bigelyte, J. L. Curcuru, M. Mabuchi, Z. Sun, R. T. Fuchs, E. Schildkraut, P. R. Weigele, W. E. Jack, G. B. Robb, Č. Venclovas, V. Siksnys, A catalogue of biochemically diverse CRISPR-Cas9 orthologs. Nat. Commun. 11, 5512 (2020).
[1229] 13. M. Jinek, F. Jiang, D. W. Taylor, S. H. Sternberg, E. Kaya, E. Ma, C. Anders, M. Hauer, K. Zhou, S. Lin, M. Kaplan, A. T. Iavarone, E. Charpentier, E. Nogales, J. A. Doudna, Structures of Cas9 endonucleases reveal RNA-mediated conformational activation. Science. 343, 1247997 (2014).
[1230] 14. B. Q. Minh, H. A. Schmidt, O. Chernomor, D. Schrempf, M. D. Woodhams, A. von Haeseler, R. Lanfear, IQ-TREE 2: New Models and Efficient Methods for Phylogenetic Inference in the Genomic Era. Mol. Biol. Evol. 37, 1530-1534 (2020).
[1231] 15. K. S. Makarova, Y. I. Wolf, J. Iranzo, S. A. Shmakov, O. S. Alkhnbashi, S. J. J. Brouns, E. Charpentier, D. Cheng, D. H. Haft, P. Horvath, S. Moineau, F. J. M. Mojica, D. Scott, S. A. Shah, V. Siksnys, M. P. Terns, Č. Venclovas, M. F. White, A. F. Yakunin, W. Yan, F. Zhang, R. A. Garrett, R. Backofen, J. van der Oost, R. Barrangou, E. V. Koonin, Evolutionary classification of CRISPR-Cas systems: a burst of class 2 and derived variants. Nat. Rev. Microbiol. 18, 67-83 (2020).
[1232] 16. K. A. Majorek, S. Dunin-Horkawicz, K. Steczkiewicz, A. Muszewska, M. Nowotny, K. Ginalski, J. M. Bujnicki, The RNase H-like superfamily: new members, comparative structural analysis and evolutionary classification. Nucleic Acids Res. 42, 4160-4179 (2014).
[1233] 17. H. Nishimasu, F. A. Ran, P. D. Hsu, S. Konermann, S. I. Shehata, N. Dohmae, R. Ishitani, F. Zhang, O. Nureki, Crystal structure of Cas9 in complex with guide RNA and target DNA. Cell. 156, 935-949 (2014).
[1234] 18. W. Bao, J. Jurka, Homologues of bacterial TnpB_IS605 are widespread in diverse eukaryotic transposable elements. Mob. DNA. 4, 12 (2013).
[1235] 19. J. V. Gomes-Filho, L. S. Zaramela, V. C. da S. Italiani, N. S. Baliga, R. Z. N. Věncio, T. Koide, Sense overlapping transcripts in IS1341-type transposase genes are functional non-coding RNAs in archaea. RNA Biol. 12, 490-500 (2015).
[1236] 20. Z. Weinberg, C. E. Lunse, K. A. Corbino, T. D. Ames, J. W. Nelson, A. Roth, K. R. Perkins, M. E. Sherlock, R. R. Breaker, Detection of 224 candidate structured RNAs by comparative analysis of specific subsets of intergenic regions. Nucleic Acids Res. 45, 10811-10823 (2017).
[1237] 21. A. Hüttenhofer, P. Schattner, The principles of guiding by RNA: chimeric RNA-protein enzymes. Nat. Rev. Genet. 7, 475-482 (2006).
[1238] 22. A. Schneider, A short history of guide RNAs: The intricate path that led to the discovery of a basic biological concept. EMBO Rep. 21, e51918 (2020).
[1239] 23. E. V. Koonin, Evolution of RNA- and DNA-guided antivirus defense systems in prokaryotes and eukaryotes: common ancestry vs convergence. Biol. Direct. 12(2017).
[1240] 24. H. Altae-Tran, S. Kannan, F. Zhang, Code and processed data for: The widespread IS200/605 transposon family encodes diverse programmable RNA-guided endonucleases, Version 1.0, Zenodo (2021); <link to be inserted after official acceptance of manuscript>.
[1241] 25. C. Camacho, G. Coulouris, V. Avagyan, N. Ma, J. Papadopoulos, K. Bealer, T. L. Madden, BLAST+: architecture and applications. BMC Bioinformatics. 10, 421 (2009).
[1242] 26. K. Katoh, D. M. Standley, MAFFT multiple sequence alignment software version 7: improvements in performance and usability. Mol. Biol. Evol. 30, 772-780 (2013).
[1243] 27. M. Steinegger, J. Soding, MMseqs2 enables sensitive protein sequence searching for the analysis of massive data sets. Nat. Biotechnol. 35, 1026-1028 (2017).
[1244] 28. M. Steinegger, M. Meier, M. Mirdita, H. Vöhringer, S. J. Haunsberger, J. Soding, HH-suite3 for fast remote homology detection and deep protein annotation. BMC Bioinformatics. 20, 473 (2019).
[1245] 29. S. R. Eddy, Accelerated Profile HMM Searches. PLoS Comput. Biol. 7, e1002195 (2011).
[1246] 30. S. A. Shmakov, K. S. Makarova, Y. I. Wolf, K. V. Severinov, E. V. Koonin, Systematic prediction of genes functionally linked to CRISPR-Cas systems by gene neighborhood analysis. Proc. Natl. Acad. Sci. U.S.A 115, E5307-E5316 (2018).
[1247] 31. A. B. Crawley, J. R. Henriksen, R. Barrangou, CRISPRdisco: An Automated Pipeline for the Discovery and Analysis of CRISPR-Cas Systems. CRISPR J. 1, 171-181 (2018).
[1248] 32. D. H. Haft, B. J. Loftus, D. L. Richardson, F. Yang, J. A. Eisen, I. T. Paulsen, O. White, TIGRFAMs: a protein family resource for the functional identification of proteins. Nucleic Acids Res. 29, 41-43 (2001).
[1249] 33. A. Delcher, Improved microbial gene identification with GLIMMER. Nucleic Acids Research. 27 (1999), pp. 4636-4641.
[1250] 34. S. Naser-Khdour, B. Q. Minh, W. Zhang, E. A. Stone, R. Lanfear, The Prevalence and Impact of Model Violations in Phylogenetic Analysis. Genome Biol. Evol. 11, 3341-3352 (2019).
[1251] 35. S. Kalyaanamoorthy, B. Q. Minh, T. K. F. Wong, A. von Haeseler, L. S. Jermiin, ModelFinder: fast model selection for accurate phylogenetic estimates. Nat. Methods. 14, 587-589 (2017).
[1252] 36. M. N. Price, P. S. Dehal, A. P. Arkin, FastTree 2—approximately maximum-likelihood trees for large alignments. PLoS One. 5, e9490 (2010).
[1253] 37. G. Altekar, S. Dwarkadas, J. P. Huelsenbeck, F. Ronquist, Parallel Metropolis coupled Markov chain Monte Carlo for Bayesian phylogenetic inference. Bioinformatics. 20, 407-415 (2004).
[1254] 38. A. Stamatakis, RA×ML version 8: a tool for phylogenetic analysis and post-analysis of large phylogenies. Bioinformatics. 30, 1312-1313 (2014).
[1255] 39. R. Lorenz, S. H. Bernhart, C. H. zu Siederdissen, H. Tafer, C. Flamm, P. F. Stadler, I. L. Hofacker, ViennaRNA Package 2.0. Algorithms Mol. Biol. 6, 1-14 (2011).
[1256] 40. E. Rivas, J. Clements, S. R. Eddy, A statistical test for conserved RNA structure shows lack of evidence for structure in lncRNAs. Nat. Methods. 14, 45-48 (2017).
[1257] 41. E. P. Nawrocki, S. R. Eddy, Infernal 1.1: 100-fold faster RNA homology searches. Bioinformatics. 29, 2933-2935 (2013).
[1258] 42. Z. Weinberg, R. R. Breaker, R2R—software to speed the depiction of aesthetic consensus RNA secondary structures. BMC Bioinformatics. 12, 3 (2011).
[1259] 43. J. Mistry, S. Chuguransky, L. Williams, M. Qureshi, G. A. Salazar, E. L. L. Sonnhammer, S. C. E. Tosatto, L. Paladin, S. Raj, L. J. Richardson, R. D. Finn, A. Bateman, Pfam: The protein families database in 2021. Nucleic Acids Res. 49, D412-D419 (2021).
[1260] 44. C. Bland, T. L. Ramsey, F. Sabree, M. Lowe, K. Brown, N. C. Kyrpides, P. Hugenholtz, CRISPR recognition tool (CRT): a tool for automatic detection of clustered regularly interspaced palindromic repeats. BMC Bioinformatics. 8, 209 (2007).
[1261] 45. F. Asnicar, G. Weingart, T. L. Tickle, C. Huttenhower, N. Segata, Compact graphical representation of phylogenetic data and metadata with GraPhlAn. PeerJ. 3, e1029 (2015).
[1262] 46. L. Maaten, G. Hinton, Visualizing Data using t-SNE. Journal of machine learning research. 9, 2579-2605 (2008).
[1263] 47. P. G. Poličar, M. Strazar, B. Zupan, Embedding to reference t-SNE space addresses batch effects in single-cell classification. bioRxiv (2019), doi:10.1101/671404.
[1264] 48. P. J. Rousseeuw, Silhouettes: A graphical aid to the interpretation and validation of cluster analysis. J. Comput. Appl. Math. 20, 53-65 (1987).
[1265] 49. R. J. G. B. Campello, D. Moulavi, J. Sander, in Advances in Knowledge Discovery and Data Mining (Springer Berlin Heidelberg, Berlin, Heidelberg, 2013), Lecture notes in computer science, pp. 160-172.
[1266] 50. D. H. Parks, M. Imelfort, C. T. Skennerton, P. Hugenholtz, G. W. Tyson, CheckM: assessing the quality of microbial genomes recovered from isolates, single cells, and metagenomes. Genome Res. 25, 1043-1055 (2015).
[1267] 51. P.-A. Chaumeil, A. J. Mussig, P. Hugenholtz, D. H. Parks, GTDB-Tk: a toolkit to classify genomes with the Genome Taxonomy Database. Bioinformatics (2019), doi:10.1093/bioinformatics/btz848.
[1268] 52. S. Frey, D. Görlich, A new set of highly efficient, tag-cleaving proteases for purifying recombinant proteins. J. Chromatogr. A. 1337, 95-105 (2014).
[1269] 53. M. Martin, Cutadapt removes adapter sequences from high-throughput sequencing reads. EMBnet.journal. 17, 10-12 (2011).
[1270] 54. B. Langmead, S. L. Salzberg, Fast gapped-read alignment with Bowtie 2. Nat. Methods. 9, 357-359 (2012).
[1271] 55. A. M. Sriramachandran, G. Petrosino, M. Mendez-Lago, A. J. Schafer, L. S. Batista-Nascimento, N. Zilio, H. D. Ulrich, Genome-wide Nucleotide-Resolution Mapping of DNA Replication Patterns, Single-Strand Breaks, and Lesions by GLOE-Seq. Mol. Cell. 78, 975-985.e7 (2020).
[1272] 56. K. Clement, H. Rees, M. C. Canver, J. M. Gehrke, R. Farouni, J. Y. Hsu, M. A. Cole, D. R. Liu, J. K. Joung, D. E. Bauer, L. Pinello, CRISPResso2 provides accurate and rapid genome editing sequence analysis. Nat. Biotechnol. 37, 224-226 (2019).
[1273] 57. A. Bankevich, S. Nurk, D. Antipov, A. A. Gurevich, M. Dvorkin, A. S. Kulikov, V. M. Lesin, S. I. Nikolenko, S. Pham, A. D. Prjibelski, A. V. Pyshkin, A. V. Sirotkin, N. Vyahhi, G. Tesler, M. A. Alekseyev, P. A. Pevzner, SPAdes: a new genome assembly algorithm and its applications to single-cell sequencing. J Comput. Biol. 19, 455-477 (2012).
[1274] 58. M. Turmel, C. Otis, C. Lemieux, Divergent copies of the large inverted repeat in the chloroplast genomes of ulvophycean green algae. Sci. Rep. 7, 994 (2017).
[1275] 59. D. T. Hoang, O. Chernomor, A. von Haeseler, B. Q. Minh, L. S. Vinh, UFBoot2: Improving the Ultrafast Bootstrap Approximation. Mol. Biol. Evol. 35, 518-522 (2018).
[1276] 60. P. J. Lockhart, A. W. Larkum, M. Steel, P. J. Waddell, D. Penny, Evolution of chlorophyll and bacteriochlorophyll: the problem of invariant sites in sequence analysis. Proc. Natl. Acad. Sci. U.S.A 93, 1930-1934 (1996).
[1277] 61. A. Criscuolo, S. Gribaldo, BMGE (Block Mapping and Gathering with Entropy): a new software for selection of phylogenetic informative regions from multiple sequence alignments. BMC Evol. Biol. 10, 210 (2010).
[1278] 62. J. Strecker, A. Ladha, Z. Gardner, J. L. Schmid-Burgk, K. S. Makarova, E. V. Koonin, F. Zhang, RNA-guided DNA insertion with CRISPR-associated transposases. Science. 365, 48-53 (2019).
[1279] 63. S. E. Klompe, P. L. H. Vo, T. S. Halpin-Healy, S. H. Sternberg, Transposon-encoded CRISPR-Cas systems direct RNA-guided DNA integration. Nature. 571, 219-225 (2019).
[1280] 64. M. Krupovic, K. S. Makarova, P. Forterre, D. Prangishvili, E. V. Koonin, Casposons: a new superfamily of self-synthesizing DNA transposons at the origin of prokaryotic CRISPR-Cas immunity. BMC Biol. 12, 1-12 (2014).
[1281] 65. S. M. Crotty, B. Q. Minh, N. G. Bean, B. R. Holland, J. Tuke, L. S. Jermiin, A. V. Haeseler, GHOST: Recovering Historical Signal from Heterotachously Evolved Sequence Alignments. Syst. Biol. 69, 249-264 (2020).

[1282] Various modifications and variations of the described methods, pharmaceutical compositions, and kits of the invention will be apparent to those skilled in the art without departing from the scope and spirit of the invention. Although the invention has been described in connection with specific embodiments, it will be understood that it is capable of further modifications and that the invention as claimed should not be unduly limited to such specific embodiments. Indeed, various modifications of the described modes for carrying out the invention that are obvious to those skilled in the art are intended to be within the scope of the invention. This application is intended to cover any variations, uses, or adaptations of the invention following, in general, the principles of the invention and including such departures from the present disclosure come within known customary practice within the art to which the invention pertains and may be applied to the essential features herein before set forth.

LENGTHY TABLES
The patent application contains a lengthy table section. A copy of the table is available in electronic form from the USPTO web site (https://seqdata.uspto.gov/?pageRequest=docDetail&DocID=US20230392131A1). An electronic copy of the table will also be available from the USPTO upon request and payment of the fee set forth in 37 CFR 1.19(b)(3).

What is claimed is:

1. A non-naturally occurring, engineered composition comprising a) an IscB polypeptide comprising a split Ruv-C nuclease domain comprising RuvC-I, RuvC-II, and RuvC-III subdomains, an HNH domain or both and b) an ωRNA molecule comprising a scaffold and a reprogrammable spacer sequence, the ωRNA molecule capable of forming a complex with the IscB polypeptide and directing the IscB polypeptide to a target polynucleotide.

2. The composition of claim 1, wherein the IscB polypeptide comprises a PLMP domain and optionally a conserved C-terminal Y domain.

3. The composition of claim 1 or 2, wherein the engineered IscB polypeptide comprises a HNH domain but no RuvC-I, RuvC-II, and RuvC-III subdomains.

4. The composition of claim 1, wherein the HNH domain is located between RuvC-II and RuvC-III subdomains.

5. The composition of claim 1 or 2, wherein the engineered IscB polypeptide comprises a RuvC-I, RuvC-II, and RuvC-III subdomains but no HNH domain.

6. The composition of claim 1, wherein the IscB polypeptide comprises about 170 to about 1000 amino acids.

7. The composition of claim 1, wherein the reprogrammable spacer sequence comprises a spacer of 10 nucleotides to 150 nucleotides in length, preferably 12 to 50 nt, more preferably 15 and 45 nt in length.

8. The composition of any of the previous claims, wherein the target sequence comprises a target adjacent motif (TAM) sequence 3′ of the target polynucleotide.

9. The composition of any of the previous claims, wherein the target polynucleotide is DNA.

10. The composition of any of the previous claims wherein the ωRNA further comprises an aptamer.

11. The composition of any of the previous claims wherein the ωRNA molecule further comprises an extension to add an RNA template.

12. The composition of any of the previous claims, further comprising a functional domain associated with the IscB protein.

13. The composition of claim 12, wherein the functional domain has transposase activity, methylase activity, demethylase activity, translation activation activity, translation repression activity, transcription activation activity, transcription repression activity, transcription release factor activity, chromatin modifying or remodeling activity, histone modification activity, nuclease activity, single-strand RNA cleavage activity, double-strand RNA cleavage activity, single-strand DNA cleavage activity, double-strand DNA cleavage activity, nucleic acid binding activity, detectable activity, or any combination thereof.

14. The composition of claim 1, further comprising a serine or tyrosine recombinase.

15. The composition of any one of the preceding claims, further comprising a homologous recombination donor template comprising a donor sequence for insertion into a target polynucleotide.

16. A vector system comprising one or more vectors encoding the Isc polypeptide and the ωRNA molecule of claim 1.

17. An engineered cell comprising the composition of claim 1.

18. A method of modifying a target polynucleotide sequence in a cell, comprising introducing to the cell the composition of any of claims 1 to 15.

19. The method of claim 18, wherein the polypeptide and/or nucleic acid components are provided via one or more polynucleotides encoding the polypeptides and/or nucleic acid component(s), and wherein the one or more polynucleotides are operably configured to express the IscB polypeptide and/or the ωRNA molecule.

20. The method of claim 19, wherein the modifying comprises cleaving a DNA polynucleotide.

21. The method of any of claims 18-20, wherein the cleaving results in 5′ overhangs.

22. An engineered, non-naturally occurring composition comprising an IscB protein, wherein the IscB protein comprises an N-terminal X domain, a RuvC domain, a Bridge Helix domain, and a C-terminal Y domain.

23. The composition of claim 22, wherein the X domain has an amino acid sequence that share at least 50%, at least 55%, at least 60%, at least 65%, at least 70%, at least 75%, at least 80%, at least 85%, at least 90%, at least 95%, at least 99%, or 100% sequence identity with X domains in Table 2.

24. The composition of claim 22, wherein the Y domain has an amino acid sequence that share at least 50%, at least 55%, at least 60%, at least 65%, at least 70%, at least 75%, at least 80%, at least 85%, at least 90%, at least 95%, at least 99%, or 100% sequence identity with Y domains in Table 2.

25. The composition of claim 22, wherein the IscB protein shares at least 80%, at least 85%, at least 90%, at least 95%, at least 99%, or 100% sequence identity with a IscB protein selected from Tables 2 and 3.

26. The composition of claim 22, wherein the X domain is no more than 50 amino acids in length.

27. The composition of claim 22, wherein the IscB protein further comprises an HNH domain.

28. The composition of claim 27, wherein the RuvC domain comprises a RuvC I subdomain, a Ruv II subdomain and a Ruv III subdomain, and the HNH is located between the Ruv C II and RuvC III subdomains of the RuvC domain.

29. The composition of claim 22, wherein the IscB protein is no more than 500, no more than 600, no more than 700, or no more than 800 amino acids in length.

30. The composition of any one of claims 22 to 29 further comprising a first and second nucleic acid molecules, the first and second nucleic acid molecules capable of forming a duplex, the duplex capable of forming a complex with the IscB protein, wherein the second nucleic acid molecule is a recombinant molecule comprising a heterologous CRISPR-associated guide sequence capable of directing site-specific binding of the complex to a target sequence of a target polynucleotide.

31. The composition of anyone of claims 22 to 29, wherein comprising a CRISPR-associated single guide molecule capable of forming a complex with the IscB protein and directing site-specific binding of the complex to a target sequence of a target polynucleotide.

32. The composition of anyone of claims 22 to 29, wherein the IscB protein targets DNA.

33. The composition of any one of the proceeding claims, wherein the nuclease domains of the IscB protein are catalytically inactive.

34. The composition of claim 33, wherein the nuclease domain has nickase activity or is engineered to have nickase activity.

35. The composition of claim 33 or 34, further comprising a functional domain associated with the IscB protein.

36. The composition of claim 35, wherein the functional domain has transposase activity, methylase activity, demethylase activity, translation activation activity, translation repression activity, transcription activation activity, transcription repression activity, transcription release factor activity, chromatin modifying or remodeling activity, histone modification activity, nuclease activity, single-strand RNA cleavage activity, double-strand RNA cleavage activity, single-strand DNA cleavage activity, double-strand DNA cleavage activity, nucleic acid binding activity, detectable activity, or any combination thereof.

37. The composition of any one of claims 22-36, further comprising a homologous recombination donor template comprising a donor sequence for insertion into a target polynucleotide.

38. The composition of any one of claims 22-36, the target sequence comprises a PAM of NAC, where N is A, C, G, or T.

39. One or more polynucleotides encoding one or more components of the composition of any of claims 22-38.

40. One or more vectors comprising the one or more polynucleotides of claim 39.

41. A cell or progeny thereof genetically engineered to express one or more components of the compositions of any one of claims 22 to 38.

42. A method of targeting a polynucleotide, comprising contacting a sample that comprises a target polynucleotide with the composition of any one of claims 22 to 38, or the one or more polynucleotides or one or more vectors of claim 39 or 40.

43. The method of claim 42, wherein contacting results in modification of a gene product or modification of the amount or expression of a gene product.

44. The method of claim 43, wherein the target sequence of the polynucleotide is a disease-associated target sequence.

45. An engineered, non-naturally occurring composition comprising:
a. the IscB protein of any one of claims 22 to 29, wherein the IscB protein is catalytically inactive,
b. a nucleotide deaminase associated with or otherwise capable of forming a complex with the IscB protein, and
c. a CRISPR-associated single guide molecule capable of forming a complex with the IscB protein and directing site-specific binding at a target sequence.

46. The composition of claim 45, wherein the nucleotide deaminase is an adenosine deaminase or a cytidine deaminase.

47. One or more polynucleotides encoding one or more components of the composition of any one of claim 45 or 46.

48. One or more vectors encoding the one or more polynucleotides of claim 47.

49. A cell or progeny thereof genetically engineered to express one or more components of the composition of any one of claim 45 or 46.

50. A method of editing nucleic acids in target polynucleotides comprising delivering the composition of claim 45 or 46, the one or more polynucleotides of claim 47, or one or more vectors of claim 48 to a cell or population of cells comprising the target polynucleotides.

51. The method of claim 50, wherein the target polynucleotides are target sequences within genomic DNA.

52. The method of claim 50 or 51, wherein the target polynucleotide is edited at one or more bases to introduce a G→A or C→T mutation.

53. An isolated cell or progeny thereof comprising one or more base edits made using the method of any one of claims 50 to 52.

54. An engineered, non-naturally occurring composition comprising:
a. the IscB protein of any one of claims 22 to 29, wherein the IscB is catalytically inactive,
b. a reverse transcriptase associated with or otherwise capable of forming a complex with the IscB protein, and
c. a CRISPR-associated guide molecule capable of forming a complex with the IscB protein and directing site-specific binding of the complex to a target sequence of a target polynucleotide, the guide molecule further comprising a donor sequence for insertion into the target polynucleotide.

55. One or more polynucleotides encoding one or more components of the composition of claim 54.

56. One or more vectors encoding the one or more polynucleotides of claim 55.

57. A method of modifying target polynucleotides comprising
delivering the composition of claim 54, the one or more polynucleotides of claim 55, or one or more vectors of claim 56 to a cell or population of cells comprising the target polynucleotides, wherein the complex directs the reverse transcriptase to the target sequence and the reverse transcriptase facilitates insertion of the donor sequence from the CRISPR-associated guide molecule into the target polynucleotide.

58. The method of claim 57, wherein insertion of the donor sequence:
a. introduces one or more base edits;
b. corrects or introduces a premature stop codon;
c. disrupts a splice site;
d. inserts or restores a splice site;
e. inserts a gene or gene fragment at one or both alleles of the target polynucleotide; or;
f. a combination thereof.

59. An isolated cell or progeny thereof comprising the modifications made using the method of claim 57 or 58.

60. An engineered, non-naturally occurring composition comprising:
a. the IscB protein of any one of claims 22 to 29,
b. a non-LTR retrotransposon protein associated with or otherwise capable of forming a complex with the IscB protein;
c. a CRISPR-associated single guide molecule capable of forming a complex with the IscB protein and directing site-specific binding to a target sequence of a target polynucleotide; and
d. a donor construct comprising a donor polynucleotide for insertion to the target polynucleotide and located between two binding elements capable of forming a complex with the non-LTR retrotransposon protein.

61. The composition of claim 60, wherein the IscB protein is fused to the N-terminus of the non-LTR retrotransposon protein.

62. The composition of claim 60 or 61, wherein the IscB protein is engineered to have nickase activity.

63. The composition of claim 60, wherein the CRISPR-associated guides direct the fusion protein to a target sequence 5′ of the targeted insertion site, and wherein the IscB protein generates a double-strand break at the targeted insertion site.

64. The composition of claim 60, wherein the CRISPR-associated guides direct the fusion protein to a target sequence 3′ of the targeted insertion site, and wherein the IscB protein generates a double-strand break at the targeted insertion site.

65. The composition of claim 60, wherein the donor polynucleotide further comprises a polymerase processing element to facilitate 3′ end processing of the donor polynucleotide sequence.

66. The composition of claim 60, wherein the donor polynucleotide further comprises a homology region to the target sequence on the 5′ end of the donor construct, the 3′ end of the donor construct, or both.

67. The composition of claim 66, wherein the homology region is from 8 to 25 base pairs.

68. One or more polynucleotides encoding one or more components of the composition of any one of claims 60 to 67.

69. One or more vectors comprising the one or more polynucleotides of claim 68.

70. A method of modifying target polynucleotides comprising
delivering the composition of any one of claims 60 to 67, the one or more polynucleotides of claim 68, or one or more vectors of claim 69 to a cell or population of cells comprising the target polynucleotides, wherein the complex directs the non-LTR retrotransposon protein to the target sequence and the non-LTR retrotransposon protein facilitates insertion of the donor polynucleotide sequence from the donor construct into the target polynucleotide.

71. The method of claim 70, wherein insertion of the donor sequence:
a. introduces one or more base edits;
b. corrects or introduces a premature stop codon;
c. disrupts a splice site;
d. inserts or restores a splice site;
e. inserts a gene or gene fragment at one or both alleles of the target polynucleotide; or;
f. a combination thereof.

72. An isolated cell or progeny thereof comprising the modifications made using the method of claim 70 or 71.

The application's sequence listing, which the Patent Office published only in electronic form, follows.

SEQUENCE LISTING (2574 sequences)

SEQ ID NO: 1 - DNA, 12 bp, Artificial Sequence
  Synthetic
acttgtttaagt

SEQ ID NO: 2 - DNA, 12 bp, Artificial Sequence
  Synthetic
  MISC_FEATURE (1)..(4): Any "n" represents any nucleotide
  MISC_FEATURE (9)..(12): Any "n" represents any nucleotide
nnnngtttnnnn

SEQ ID NO: 3 - protein, 383 aa, Actinoplanes lobatus
MKLVVQVKLQPTAEQASMLEATLRACNTAANEVAQVARRARVYRNYDLRKHVYAGIKADHRLGSQAAQHVIKKVCDAYKTLTSNLRAGNYGPPDAKRYRRVSTEPVRFRWQAAQPYDARMLSWQHDARTVSIWTVAGRMKNIAYTGSPDQLKAVAELPVGECDLVHRDGMWLLYATVEIAEATPVEPAGFLGVDLGIVQIATDSDGTVYAGEQLNRYRRRQIRLRAKLQAKKTESARRLLVKRARRESRHATNVNHVISKSIVAEAERTSRGIAVEDLTGIRARVRLRKPQRAALHSWSFAQLGGFLTYKARRAGIPLVQVDPRYTSQTCSACGHRDKRNRPDQATFICRSCGVVAHADVNAAVNIAARGVDVWGAVSRPYVA

SEQ ID NO: 4 - DNA, 600 bp, Unknown
  Ga0207030_1011 JGI
atgtctgtttttgtgttagacaaaaagaaaaacccattaatgccatgttctgaaaagcgtgcgcggctattgctacaacgtgggcgtgcagttgtcattcgagtgtatccatttaccattcgtttgaaagatcgagtgggcggtgaaacacaggatttacgtttaggcattgatcccaggagtaaaacaacagggttaatgctcgcgcgggagtgtgagaaaattgattcagagagcggcgaaattaagcgaactcgcttaacagcgcggggtttccctcgcggatatttgctgcgtaaaaaatctgttaatggatttcaaacaggagacatggttattgctgatataccaaaaggggttaaaagtggcgtacatgttgggagagtggcaatacgttcatctggttattttaatattcaatcgacaaaaaatgttatccaaggtgtatcacatcgtcactgcaaaatgatgcagcgagctgatggatatggttattcaattgtagcgcaacaaaaagaggtaagtgggaatttggggcacgcttcgcgcgccgcgctatccatccccggcatgaatgctgaggtttcccgcgcaatttga

SEQ ID NO: 5 - DNA, 303 bp, Unknown
  Ga0207030_1011 JGI
gtcaatcaccccgccctaaaggacggagcttgtaaagcataagccaaacaagcttgaggttgaccagggaaagcggtaaccaacccgctaagttgtaaacaggtacaagacccaccagcgaatgcttcctcagttcgctgctctggaagttgcagatgcagacaaggttcgggtaactacgaaacggtctgtgactaggtagacatactgaaggccggtttacaacattcccgaggggagatacaccgcaaggtgtgcgtcacaagacccgtaagggtattttttaggaaaatggttatgtct

SEQ ID NO: 6 - DNA, 771 bp, Moorea sp.
atgcgagtttttgtacttgataaaaacaaaaaaccattagacccatgccagcctgctagagctagaatcttgctcaaacaaggaagggctaaggtctttaggagatacccgttcacaatcatcatatgcgatttggaggaattggaatgtgtgacacataatcatcagatcaaacttgaccctggttctcaaacaacaggtttagcaattgttcaagaaaaggtggttgtttggggtgcggaactaacccacagaggtcttcaaattcgagatggtttaacctcacgtagaaagttgagaagttctcgtagaaaccgcaaaactcgttatcgacagccacggtttcttaaccgtaaacgtcctgatgggtggttagctcccagtctaatgtcgagagttcataatattctcacatgggtaaaaaaacttactcgattttgtccgataactggcatttctcaggaattagttaggttcgatactcagaagatggaaaaccctgaaatttctggaacagagtatcagcagggcacactctacggatatgaagttagagaatatctactttccaaatggaatcgtaaatgtgcttactgtggtgtgactgatactcaactagaggtcgaacacatcaaacctaaatcaaagggcggttctgaccgagtaagtaacctagcaagtgaggtatggttccagtgtatgagtgaaggagtcaactatcccgttactgatttggtgtcgtggcagggaaaaagttactgtggggtctag

SEQ ID NO: 7 - DNA, 265 bp, Moorea sp.
gtcaggagcctgggagtagcaaaccccacggataaatccgggggcttgtgaatcattacctgaccagcccaagtcccatcagggactacgttatcagcaagagttaaagttcctaccttgaaatgcgacgctagtttcaagctctagaaccggattgttaaacatctttatcaggttaaggaagtgcaacgcgcgaaagtaccgactgataacattggcgcagcgaactttaccctagcaataggagaatactcacattatgcga

SEQ ID NO: 8 - DNA, 1554 bp, Unknown
  contig_4171967 MG-RAST
gtgatctggatagctgtatcgaagctatggaattgtaataccacagggaagtgctttacaggcggtgccctgtggaacaagggaagatttttggaaaggaggcatcggcagatgctcatatacatcatagacgcatcaggaaaaccgctgatgccgactgaaagaaaaggacatattaagagacttttgaatcgtggcaaggcacgaattgtcactaaggtgccattcacggtacagctgaaatatgagacaccaggcatcacacagccgttatacggcgggactgatcccggtagaacaaacctcggggaagctgtgattgatgaaaatggtactgtgatatataaatcacatgtcgaaacacgaagcaaagatatccctaagctaatgtctgagagaaaacagcacaggcaggcgtcccgcaggggagaacgtctgagaaagaaacggcgtgctgcgaaatgcggtacaactaaagtatttactgaaggacgcacgataccaggatgcgaaaaacccgtcatgatgaaggatatcatcaatactgaaagcagatttgccaacaggaagcgttctgaaaactggataacaccgacaacgaggcaactcatacagacgcacctcaatatggtgcgaaaaatatgtcaggtgcttccggtaacagactggactcttgaaatcaaccgttttgccttcatgaagatggatgatggcggtatcagaggtttggatttccagaacggcaggctcaaaggctacagcagctcacatgagtacatatacgctatgcaggatggcaaatgtgcctgctgtgataataacatcgagcattatcaccatctgacaccacgttcaaaaggcgggtctgatacaccggaaaaccttataggcctctgtggttcatgccataaaaagatacatactggtgacctgaagcttgaaaatatcggactcagaaagaaatacgctgcactaagcgtactgaaccaggcaataccgtttattattgatggacttgtagagatattcggtgaaaaacacgtccatttctgcgaaggctataatactcagatgataaggaaaagcctctgcataggaaaggatcatccggaggatgcggtatgcatcgcacttcttggagtgggtatccaaaaggtaacggataacacggaagcctttgaagtgatgcagttccgaaggcataatcgagcaataataaataatcagcgtgagcgtacctattatcttgatggtaaggccgtttgtaagaatcgtcacaagcgttttgagcagaaaggagactctcttgaggaatttagtaagaaacatccgtctgacgtgaaacgtttgactgttaaaaggagcacacgtttctataatgctaataacagattgatgcctggagtagtatttacgtacaaagggcagaggtatgtaatgtcaggacagcttacaggaggaaaataccttcgtgctgtcggagacacaaagacaaactatccggttacacaatgctatatcttaaatgaaaacacaggccttgtgtatatttaa

SEQ ID NO: 9 - DNA, 178 bp, Unknown
  contig_4171967 MG-RAST
gtcaataaccccgccccgtgaaggggcgaggcttgaaaaagcctaatctgagttattgagcagagctatgatacagcagcaacaacgccaccacatctgattccaaggtatgtgatctggatagctgtatcgaagctatggaattgtaataccacagggaagtgctttacaggcggtg

SEQ ID NO: 10 - DNA, 1344 bp, Unknown
  rumenHiSeq_NODE_3861232_len_211451_cov_5_332990 JGI
atgaaaccaaaacataaaatcaaaaggaggaagaaatgcttaaagcagaaactagtatttgtagttgataagaaagaacgttctttgatgccttgtacacctagaatagcaagattattgcttaaacaatgtaaagcaaggatatacaaacacgcttacacaggattctttgctatcaaactcaattatattccttctaagtgttaccttcagaagaataggattggagttgatactggaagtaaatacatcggtgtttcagttgtaaggattgacaaaaatcaagaaaaagtttctagaagttgcactcacctttatgaagttaaactaagaggtgacgaaataactaagaacatcgaacagcgaaggatgtacagaagaaatagaaggaataggaagacaaggtatcgtaaacctagatttcttaaccgtaagaactctagacgggaaggactaaaaaatccaacaatgatacataaatttgaaactcattgtaaggttattaatactctacaatccttacttccaaaaacaaagttaatcttcgaagttggaaactttgacccacatttgatgaagaatgaaagaaaagcatttaacagacattggggttatcaacgtggggtaaattatggattcgctaatcgtaaagcttatgtattatgtagagataattacacatgtcaacaatgtaagaaaaagaatgtagcattacatgttcaccatatagtttatcgttctaacggcggaagtgacgatgaatcaaacttgataactctttgtgaggattgtcaccacaaacttcatcaaggaaagataaagttaaagaaatccatcagtcaaggtaaaaagaaagcacttaaagatgcaactcaaatgaactatcttaaaggtcttttgatagaacattatcccaaggctagaataacttggggttatatcactaaagaaaaccgtcaataccttaaactatctaaagagcattattttgatgctctggtgattgcgtctaaaggtaagaaagttaaggtggaaacaaatcaagttaccaagatagtcaaagttgctaaaggtgactatcaactttcaaaaggaagctgtagcgaaaagatgctacctaaaggtaaagttaatggatttagaagatttgataaagttaagtattttggtaatgaatatttcattaaaggaagaagaacatctggaacaggagaattaatggatgtagaaggaaataaaattgacttttcttatatgccgaagggatttagaacaccttcaatgaagaatatgataagattttcatcaagaaggtctttgatagttaaaaacgtttcactttaa

SEQ ID NO: 11 - DNA, 355 bp, Unknown
  rumenHiSeq_NODE_3861232_len_211451_cov_5_332990 JGI
gtaaactactgctagtctaaagacatagcagcttccttaaatgttaccagacttagttctttagttaggactacgataagaaagtcatgacaccttaggttgtcgcctcagacctatgctctgtcgttgatagttaaacaaggcgggaattaaatgaacctagtgctatcaacataaaaagctttcttatctttgtcgagaggaaatccgaagtccttgaataaggcagtaggtacacttgttgtgagaacaacaaggatggacatcaagtttgtctatcaaatatctctaaagcaaggagagttaaaaaatgaaaccaaaacataaaatcaaaaggaggaagaaatgcttaaag

SEQ ID NO: 12 - DNA, 1104 bp, Unknown
  Ga0334820_006144 JGI
atgcaggatgcttctcaagtcctgcttcccttggttagtcagtctcgaagagagaaattgccccgtaagggagataagaaggtaacttctttgtcaataagagttccggttgtttcgtcaaacggaattccattgatgccatgtgaaccagcaagagcgagagaattggtaaagagtgatagggcgattaggagattcaagacaggaattttctatattaaattggtagaaagagaaaccggagatgtacagaaagtaacatgcggaatagatcctggaagtaagcgagaaggattcacagtaaagtcagccaatcatacatatataaatgtactttctaatgcagtggatacggtaaaagataaaattaaaacaagaatgatgatgagaagaaatagaagacaaagaaaaactccttatagaaaaaataaatgtaatcgaaaacatgggggtttgccgccttcaaccagggccaggtggcaagcaaaattaagaataattaacatattaaaaacattatatccaataagtgtttatattgtagaagatataaaagtcagaacaataccaggaaaaacaaattggaacaaatcattttcatcattagaaactggaaaaaatttgttttattttgaactgagaaaaattggtagtgttatattaaaacaaggttatgaaacaaaagaatatagagataaacttggattaataaaaacaaaagctaaattagagaatgttttttcagcacacaatgtagatagttgggttttggctaatttagaatttgaccagaaagttccagataacactaatatttttagaatgattccattaaattttcacagaaggcagttgtattatttacaaacagaaaagaatgaaataaaaagaccgtttggtggtactataagtcacggaattactaaaggaactgttataaaacataataaatatggttatgtttatataggtggaaaatataaagatagagtttctgggcatgatttaagtacaggggcgagagtttatgctaatattaaaccacttgaagtagatatactatatatgattaagtggaggtttttgattagtctaaattcttaa

SEQ ID NO: 13 - DNA, 273 bp, Unknown
  Ga0334820_006144 JGI
attaattatccatattaaaatatggacttgagtaagtaggaaatgccaatttcgaaagaacaagttaaacaagagattagagtgcccaagatcattggacgcaagcgtaagtctgcgtccaagggtcgtttgaaggaaactgaactaactaaccgtggcaggttgaacaatatgcaggatgcttctcaagtcctgcttcccttggttagtcagtctcgaagagagaaattgccccgtaagggagataagaaggtaacttctttgtcaataaga

SEQ ID NO: 14 - DNA, 1380 bp, Unknown
  Ga0210025_1000354 JGI
atgcagcgagtgttagtgttagacaaacataaaaatccattaatgccatgcacacccgcaagggcaaggatattattgtctcaacataaagctgcagtgtttaagatctatccatttacacttattttgaaaaacaaaacccaacataacactcaaccaatacaagttaaaatagatcaaggttccaaaaatacaggcattgcactggttgctgagtttaagcaaggtaaaacggtgatatttgctgctaacttacaacataaaggccatgccatttctgaaaaactggctagccgtgctgcctcgcgtagatcaagacgcagtagaaaaactcgatatcgaaaaccgaaatggactaatgctatgtctaaaaagcaattggtgcatattaatcaacgtccaaaaggatggtttcctccatctgttacttcaagagtggataatgtaacgaatttagtgaataagttaacaagattaacacctattagtgctattgccgttgaaaatgtgcgttttgacactcaattaatggaaaataaaagcataagtgggatcgaatatcaacaaggtacattgtttgaaaaagaagtaaaagaatatttattgcatttattccattataaatgtgcctattgtaatggattaagtaaagatcctattttggaaaaagagcatattattcctagatctaaaaaaggttcaaacagaatagataatttatccttggcatgtcatacttgcaatcaagctaaaaataatttgttgccacaagaatggttaatggtgcttaaaaaatcaacgtcaaaaattaataaagagcgagtaaaacgctttacccatatcattaagggcattaaaccgtcattgcgtgatgcggcagtcatgaacgccattcgttataaattagtagacgcattaagggtatttaatttaccgattgaattaggcagtggtgggttaaccaaattcaatagaaccaatcaacaattacccaaagatcattggatcgatgcagcgtgtattggacaaagcggcaataatattattatccctaaaaatctaatacccattaatattaaggccgttgggcgtggttcaaggcaaatgtgcttgatgaataaatttggttttccacgaacaaagccgaagaagaaagggcattgctttaattttaaaacaggtgatctcattaaggctatagtcactaagggtaaaaaggaaggaacgtatattggtagattagcggtaagaacaagtggtaatttcaatatatcaacaaaaaatggcatagtgcaaggtattaactaccgttattgtcgattgcttcaaaaaaacgatggctatcattatagcaatcatataaatcaattaattaactaa

SEQ ID NO: 15 - DNA, 258 bp, Unknown
  Ga0210025_1000354 JGI
gtcaacaaattaaggtgagatcgtaagattatggttgacccgactcagtgtttgcatttttgcattcactacgttaagtaagaatatatagtgagttcggaatactactccagttccacaaactcaggatctacgttaaacagtgacttttgggtaagaagcagtgcgtagttcaataaaccttatttaacattgtctaggagtattttaccctcgtaagaggtgtcccgttatgggaaaatttaacaaaaaggaata

SEQ ID NO: 16 - DNA, 1311 bp, Unknown
  Ga0256405_10001455 JGI
atgtatttagtatacgtaaaatctaaaaatggaaaccccttaatgcctactaaacggtgtggtagggttagaaagctgttaaaagagggaaaagcaaaagtgatatgtaaatgtccttttacgattaaacttctttatgacagtactgagtacactcaaaaactgtctttgggtattgatgttggttcatcacatatcggttctgccgttgttaatgaaaaaggcgatactgtttatatggctgaaacaacaatcaaaaatgacataaaagataaaatggaacaaagacggatgtataggagacacagacgttcaagaaaaactcgttatagaaaagctagattcttaaatagaaagaatagtactaaaaaaggtagattaccacctactttaattagtaaaattcattctcatgtaaaagagattgaatttgttaaatctattcttccggtaacagatgatgatctaatttttgaaacagctaaattcgatatgcatttattgaaaaatcctaaattgcataatgaaaaatatagacattttggttatcaaaaaggtatactttatgggtatgctaatgcccgtgaatacgttttagaacgagataatcatgaatgtcagatatgttgtaaaaaagaaggttataaacgtaaaaatggtattcgattagaaacacatcatattgtttatagaagtcggggtggaagtgacgatccaaggaatttaattactgtatgtccagtatgccatccaaaaatacatgatggtaaaataacaatagacattaaaggaatgccttttggggttttaagacatgatactcatatgaatataatctcaaaacgattagttgaccgttacccaaatgcaatagaaacatacggttatataactaaacaaaatcgttttgaagctaaattgcctaaacgacattatatagatgcatgtataatagctaatggtggaccagatgttaattttaaatctgatatagtatatattaaaagaagtgttactaaaggtgattatagacagactaacggaaaacggtctgaaaagcgaatgaatagaggtaaagtaaacggtttaagacgttatgataaagttcaatataaaggtaatatatactttataaaaggtattgatagcaaaggttatgcgactttaatggatataaacaataaaacaattaaatttccagatgcgcctaaaagagataaaacacctaaattatctaaaataaaaaggataactgcaagaaacacatgtctaatagatatagaaaaggttcacattgcatatactcgttaa

SEQ ID NO: 17 - DNA, 298 bp, Unknown
  Ga0256405_10001455 JGI
gtaaactaccccaccccatgaaggggtgtggctttcattaaataacagtttaccagactaagtttagagaaatctaaactacgatgttaaggtcatgctacctttggttgacgcatcagatcaatgctctagcatcttaaaaaactgataaggttgaagtaataaatgccttacgataagatatgacaagccttaatgtcattgtcgagatgaagtcggattttaattgtggtaacagcaattaaatacgcataactaagtcttaggactttgaattatattcttaaggaataattat

SEQ ID NO: 18 - DNA, 1380 bp, Unknown
  Ga0224415_10000689 JGI_Dark_Harvest
atgccttgtctgaatccaaagaaggtacgaaagcttctgaaagaaggacgtgccgtcatcgccggatataagccgtttaccattcagcttacatacgaatccgggaaggaaaaacagcctgttgaaatgtccatagacgccggcgacaggcacgtaggtaattccatcaaatcagaaaagcatgaattcattcatgaacagcgtgacctgcttaaagatggaaaacaaaaacatgatgatcagagaagactacgcaggacacgccgtaacagaaagcggtacagaaaacccaggtttgacaacagacgtatccctgaaggctggcttgctcccagcatcagaaacaagaaaaacatccatgtcatgttatacgacacgtacagaaaagtaattcctataacggatgtttttattgaaaccggttcgtttgacacaaacgcgctgcatcttcaggagcaagggcttcccgcacctgaagaaacagattatcagcatggtccccgattcggatatgacaacctgcgggaagcagtattttacagggatcatcatacctgtcagatctgtggttctacgatcggtcagataaaaaagaaagatgggtcctttaaaccaggcgaagttattttaaggatgcatcacataggatatcgaacaggagaccggaccgatcgtatgtctaatctccttacagtatgtacaaggtgccatacgcctaataatcataaacccggcgggaagttatatgatctggaacctgtgacacgaaccatatccggagccgctttcatgaatacagtacgatggtatgtattcaatgagataaaagccattgacagcgctgtacatgttcatatgacatatggatcggtaacaaaacgtgaaaggctgtcaaggcgtatcagaaagacgcacgcaaatgacgcgtactgtataggatacttcagaccgaaacataaagcttctgaggaaatctttcagaagatccgccgtaataacaggtgccttgaaaaattctatgacgctgtatatatcgacagccgtacaggagaaagagcttccggcggatcattaagctgcggaagaacaaacagatcagagtcaagaaactctgatacaaataaacgaatatatcatggcagaaaacgtacaaaaggatacagaaatatccgcagaaaacgtcatcccctgcaggcaggagacaaagtaatattccaagggaaaaaatacacagtaaaggccagcaggacaagatataccaaaacacatggttttcatgaaaccgttgaactaaaagaaataccaaaagaacatcttttagaagagataaaactggttagtcacatatccggctggaaaaaagtccagccggcatcataa

SEQ ID NO: 19 - DNA, 376 bp, Unknown
  Ga0224415_10000689 JGI_Dark_Harvest
ttcggattactctttatgaatctctgtaagcccggttgattagcctaaatgacgaaattggtgtctctgacatcacaaccgtcatttatcagagaaggcatttatgccagtatctacgtttgataccaataatatagtcacgtcagaatgctccacaagttctgtcccatgagcctgtatattaaaaatttctgagggtaggaaacgtgtatacaggatgatatccgaaaccggtttaccggttttggatatctgaaacggtgttgaacattggcgttgtggcccactcccgagagggaagataccgtacatgcttttaatgtacggaaggcgtaagccattaaaaagaaaggaggcataagccttgagctatatt

SEQ ID NO: 20 - DNA, 1329 bp, Unknown
  Ga0210041_1000150 JGI
gtgtctgtattggtgatcgacaagcgaaagaaaccgctgatgccgtgtagcgagaaacgagcaagaaagttgcttggttctggccgtgcgcgtattcatcggctcattccgtttgcgatacgactgattgatcgtgaagttgccggttgcgatttgcagcccgttaaaatcaagattgacccgggtagcaagtacaccggcattgccgtggtgcgcgaatcaaaggaagtggatgttgcaactggcgagatcagcgttaccgcgcatgtactgaatatttttgagttactgcatcgcggccgtcagatcagcgaagccttaacgtcgcgccgggcaatgcgccgccgtaggcgtggatgtttgcgctaccgagcgcccaggtttcttaatcgcggtaacaaagccaagggctggttagcgccaagcctgcaacaccgtgtcgatacgactgttgcatgggtgaaccgtttccggcaattggctccgatcaccgatatcgctcaggagttggtgcgcttcgacatgcaggcgatggagaatccggagatttcgggtgtcgaatatcagcaaggtgcgctgattggttacgaagtgcgcgagtatttgctggaaaaatggggtcgcaagtgcgcgtactgtgacgccaaggatgtgccgctgaatctggatcacatccagccaaaagccagcggtggaagcaaccgtgtttcaaatttgaccctggcctgtgtgccgtgcaaccagaagaaaggcgcacaggatgttagcgtgttcttggcgaaagaccccaagcgattggatcgaatcctgacgcaagctaagcgtcctttaaaggatgctgctgcggtcaatgcgacacgctgggcgttgttcaacgcgctcaaggccactggcgttcctgtatcaacaggttcaggtggcttaacgaagtataaccgtgctcgatttggtatcccaaaagcgcacgcgtttgacgctgtgtgtgttggcctggtgagtgccgtgacaggctggggaaagccgacgctggcaatcaaggctaccgggcggggaagctaccagcgcacgcgcttagatgcgttcgggtttccgcgcggttacctgacacgagaaaagcggattcaaggattccagactggcgatatggtcagcgctaatgttgccaacggcaagaagattggtttttatgttggtcgagtggcggttcgcgcaaccggtagtttcaatattcagaccgcgcaaggagtcgtacaaggcatatcccataggcattgcaaagtgattcagcgtgctgatggatatggttattcaatcgtggcaaaaatgtag

SEQ ID NO: 21 - DNA, 298 bp, Unknown
  Ga0210041_1000150 JGI
gtcaactaccccgccctaaccggcggagcttggaagggcagtaagaagctcggttgaccagcctaagttacggagaaacgtaactacgttgtagcgaagtacaagaccgacgttgggatgcttcctcagtcccaacctctcgaagcggcaggagtagacaagcgaagggtaagcacgaaacagcttgtcgcaaagttcaaagtaccgaactgaagctgcgttacaacattggcgaggggagcgaaccgaaaggttctgtcacaaggtgcgtaagcacatttaggagaaacaagtgtct

SEQ ID NO: 22 - DNA, 1302 bp, Unknown
  Ga0163150_10004194 JGI
atgttagtcttcattttaaattctcatggcaaacctctgatgccttgtaagccgcagaaagcccgtgttcttttaaaagacaacaaagcaaaagtgatcaaacgactgccgttcaccattaagctcaaatttggagcttcaggttttaagcaggagttaacggcagggatggactctggcagtaaagtcattggcaccgctgtagtaactagaagtggcaaagtactgtatcaggctgaaacgactcttcgaggtgaagagattaaaagtaagatggccaccagggcgatgtatcggcggaatagaagaggcaggaagaccagataccgacaaccaagatttctcaatagaagagcctcgacttcccttaaccggcttcccccctcgacaaaacacaaggttgagtcccatttagccgaaaagaagtatattgagtcaatcctgccgatcacaaattggcggctagaattagcttctttcgacatccacgccttaagcaatccagaagtatccaaagccgcatggtggacctatcaacgtggcgaaatgtatggcttccagaatcttaagcaatatgtcctaagtcgagatacctatacttgtcagacctgtaaaaagaaaccgaagcagaacgttgagcttcatgtccaccatattcatttcaaatcaaatgggggggctgataccaaaaacaacctgattaccttgtgtaaaccttgccacgacaagcttcacagcataaaaaatgctcaacagcattctctaaaattaaagccaaaggcgacaaataccaaacatgcaactgagattaacatcgtcgccgctcaactaagaaaaagtgattggaacttcgcagagacttttggctttattacaaaagttaaccgattggcacaaggtttgccgaaaagacacttcatcgatgccgcagtcatagcctcccaaggactggatatccgagctttaaaaagaacgatcattagaagacgtgtagccaaaggcgattaccagcagacaaaaggttctagatctgagaaaaccataccgacgggaaaactctttggtctaagaaaattcgatttaatcaaaacacctaagtgtactggctttatcaaaggcaaaagatcgtcaggtttttttgccattagcgacatacatggccattcgatctgtaactccgtcaaagttaaagccgactgtacccgcatcacagcgcgaacgacaacccttgcttatgtggagaatttcgaggctgacgcatcgatgctcgccgcagggcttcaccattcctcctccacctaa

SEQ ID NO: 23 - DNA, 295 bp, Unknown
  Ga0163150_10004194 JGI
gtcaattacccccacctaaaggagggggcttgtgaggtgactcataagggtaactagttgaccagaccactaacaaagaaaggcaagaaaaattgttagtaaacgttaaagcagaatatcacaccttcggatgccgcctcagtccgttgctctgtggcctactattaaacagagttgaaagactcagtgtagtaggcgtaaaaagttgttttaactggtcgggaggaagtcgtgatatcagattcaaccttttagaagctgatatcatgcgtcactgtttagaatttagcaggag

SEQ ID NO: 24 - DNA, 1038 bp, Unknown
  Ga0209777_10000113 JGI
atgaagaaagtaatggttcctgtagtagacaaaaataataagccacttatgccaactagttgttggagagcttccaagtggattaagtctagaaaggctactccattttggaaacatggtatattttgtgtacgattaaacgtagaaccttctgccagaaatatgcaacctatagcagtaggtattgatccaggtagcaaaagagaagcatttactgttaaatctaagaagaatacctatgtaaatattctgacacatgccgttactcatgttaaagatgtgatggaagatagaaaaagtgctcgtaaaagtcgccgatttagaaaaacaccatatagaaaacaaagaaaaaataggaaaatgggtggactaccaccttctactaaagctagatggcagttgaaacttagggttattaataagcttattaaaatttttccaatttctcaatttgtagtagaaaacattaaagccgtaacaactggacaaaaaagatgggattctaattttagtccattaggggctggcaagaaatggttttatggcgagcttagaaaaattgctccagttaagcttatgcaaggttgggaaacttgtaatttaagaaatcgacttggacttgagaaaacttattcaaaattggatgaaaaattttcggtacataatgttgatagttggactttagcttggagtggggttggcggaaaagaaaaaccagataatgaatctttattaattttagtttcactaagatttcatcgaagacaattacattattgtaatttttttaaggggggaaaacgacgtttatatggaggaacaagaagtttagggttaaaacggggaagtttagtagatcattcagaatatggactttgttatgttggtggatcatctaaaggtatgataagtttacattcacttgtagatggttgcagaatttatcaaaaagttaaattgaaagatattaaatttaaatgttatagtagttttagattttatacagagaaagatattactgatccttttgttgcttaa

SEQ ID NO: 25 - DNA, 281 bp, Unknown
  Ga0209777_10000113 JGI
gtcaatggccagtttctaaaatggtttgaaagtccctccaaagggcaactttcaacgtaagcattgactagacaacgattggaaaggaggttaaagacaaaagaaaattccaatcaaactgaacaatctacccgtggaagggtgaaacacgttgcgaatgctaccctagtttgcatcctctgtgattgtcagtgtcgaagggttgtatacatgatagagttttctttgaattgcctaaaacgattcaaggaattttggagaagcaaatgaagaaagtaatg

SEQ ID NO: 26 - DNA, 1350 bp, uncultured Clostridiales bacterium
atgacgactttcgttatatcggcagaaggcgaaaagctgatgccgacaacaaatatcaaaaaaatccgaaagctcctccgatcaggaagagccaagatcgtgaagcacgcgccgttcaccgtgcagcttctgtacgagagcggaaacgccgtgcagccaatcgagtttacggaagataccggctatcagtatatcggagtctctctcaaatcggagaagcacgaatacgtgagcgccgagtatacgcttcttaagaacgagaagcagcatcacgacgatcagcgtcgcgaggtaagacgcccgcgtcgcaacagaaaacgctaccgcaaggcgcgcttcgacaacagaagaaagtctgaaggctggctcgctccgtcgctcagaaacaaggcggaccgccatgtagatatcttcaagatgtactgcgaggtatgcccgataacaagcgtcacgctcgagattggacagttcgacccggcggtgctcgatgctgtagagcaaggcaagcccttgccggaaggcgttgattaccaatacgggccgcgttacggatacgacacgctgagagaagcagtcttcgcaagagacggttacagatgcctctgctgcggtaaatcagttatagaagacggcaccgctctcaggctccatcatgtgggctttcgcacgggcgacagatcgaacaggctcggcaacctcgcatcagtatgcgagaaatgccacagcccgaagaaccataaacccggcggaaaactgtgggatatggcacctcctaaaggcacggcatccgcagcgtacatgaacatcgtcaggtggcatatctacgagggagtcaaggcgtttggcgtagacacacatataacctatggtgccgtaacgaagcgcacaagacgtgatctcaacatcggaaagtcacacgcgaatgatgcctactgcatcggcagcatgagaccgaaacgccgcacgaagacgcaatactttgaaaagcgccgccgcaacaaccgcatactcgagaagttctacgacgcgaagtatctggatattcgtgatggcaaaacaaagaaggcggcggagctcgggtgtaatcgcacctcgagatccataccgcgaagcaatccgcagaacgagcgcgtcttccgcggggagaaggtgtcgaacggcagacgcagtatacgcgctcagaggtatctgtaccagccggacgacattatcatcttcggcggcaagaagcgcatggtcaagggtacgcataacaagggctcgagtgtgcagcttattggaggaggcgatatttcgccgagaaagataaaacttcatcaccacgctggtggctggagacaagtagtttaa

SEQ ID NO: 27 - DNA, 332 bp, uncultured Clostridiales bacterium
gtcaactacccaccgcttagactgacgtcttgaagcgggggcttgtgaaaacaagtcagttgattagcctgagtgctcagggcactacgttatctgcgaatatacaggtaccccgggatgctccacaagtcccgggcactacggatatgcgttaaacatcggtgagggtagccgaagtgcgtatatcatcaaaccgcggaataacattggcgatgtggacaccgcccttcggggcgaggatccgtatacacgcctcttcggagacacggtatgcggaaagccgtaaggcagcatgttagcactaaaaaaacagaaaggaggagcacatgacg

SEQ ID NO: 28 - DNA, 1440 bp, Unknown
  Ga0190327_1001504 JGI
atggattcacaaggtaatattggacatccaacacgaaaaggtagaatggtccgaagattattgaagaaaggtaaagcaaaagtaatagctggtggtgtaaagaaaggtcagccattgttaatacaattgcttgataaagtatttgataaatctaagactatagatacagaatttcgtattggtattgattcaggctataaatatattggttatagtttatttaaaatatataaaaatcatattgaactattactatctggtgaagtagaaactcgtacatctgaagttactaaaaatctaagtgatcggaagatgtatcgaagtcttaggcatcaatatagacgaaagaatgttaaacgtaagtttagtaaagctaagtttagacatcctaaatggaaaaacagagctaaacatgcttttcaacctactcatagacatttgattacaagtcatattaatatattaaaatggttatttaaaagagtaccaaaggatcaatgtgaggtacatttagaatatagtaaatttgatgttcaaaaaatgatcaatccaggtattcacagttggcaatatcaacgtggtcctcaatatggttttgaaaatgtgaaagcatatattcgtgatagagataattatacttgtcagatatgtaagaaacatattgctaatgaaaaaaatgaagtacatcatattataccaagatctaaaggtggatcagatagaccggataatttgattcttttatgtcaaaattgtcatacaaaagtacataccggaaaagtttcttgcacatcaaatttgattcacagtaaatttcgtgacgctggtgtattgaattcttgcatgaaatggatgtttgataactttagtaagaaagtttcattagtaaaaacttttggatatattacaaagactgttagattaaatagtaatggtaagatttcaaagacacatgctcatgatgccatgataattgcactttgcaatgaaaatggtcctgaaactaaattcaaaacatatactaattatgatcatcatataacagttaattttaaacaatatcgtagacatattagatcttggacacaaagattagaagatcgaaaatattatttaattgatgatttgaaatttaaaaaatgcgtagctcataatagaagaagagctacagcacaaaataaaaaatatcctagtcttgaagaatatttagaaaaatattctaatatgcaattaatagcaaagcctggtggacggattatgaaacaaagcgaaaagaatatgaattttcgccgaggtgatataattaaatgtccaaaaggtattgctactgtgcaattttatgaacttagacataaagaaattactactgcacaatttggtagaattagagaaagagtttgtactaagattttaaataatgctggaatgtgtatcgtttag

SEQ ID NO: 29 - DNA, 313 bp, Unknown
  Ga0190327_1001504 JGI
ttttaaaaaacaggaggagaaaatttatgaaagtcgtgcaggcattaagtcaatcttaaattttaatatttaagttgacacagacgactgactattggttcaccctggaatgccactcccagttccaggctctgaaggtgttagtaattatattacttagtcctcattgcgatatatttcttaaatataacgtattaccaatagtcaagtcgggggagaccaacctaattaattaagctgagcttttaattagcttttatcatgaagttatttttaaaagcaagtgaattggagacaaattttaaacatgatt

SEQ ID NO: 30 - DNA, 660 bp, Unknown
  Ga0376669_0068582 JGI
ttgtcgaggcccccattacctgggcaaccagagactccgaaaggggtaatcgtgagcaaagtattcatgttagacaccaatttcagacaactcaatcccgtccatcctggggaagccagaaaattgctttcagcaggaaaggcagcggtctaccgtcgctatccttttacgatcatcctcaaaagggctgtcaagacacctgttgaaccactacgggtcaagatcgatccaggctcaaaaaccacggggatcgccgtcgtcaacgatacgacaggagaagtcgtgtttgcagcagaattgtctcatcagggagagatcatcaagaagcgcttagacaaacggcgtggagtgcgtagaagcagacgtaatcggcgtacccgctatcgccaagcacgatggagaaaccgacgcaacaagaaaaggggctggttgccaccatctttgcagagcaggatcaccaacagtgcagggcgcatggcagcacgtgcgacaggctcattcaatatcacaaccaagggcaagacggtccaaggaattggataccagtattgcaaagctctccatcggtcagatggatacagttaccagaagggagcgaccattgtgcttgcccagccggaaacagagacggtagtcgcttcccctgaacgtgttgtctag

SEQ ID NO: 31 - DNA, 280 bp, Unknown
  Ga0376669_0068582 JGI
gtcagggaccccacgcatgaatgcgggggcttgcagtgatccggcaatggattagtgcggcttcacctgaccagactcagtgctaggcttgtctctagcactacgttaggagcgaaataggtacgttgggatgcgtgggccagtcccaaccgctacggttgcaggttaaacaggattacgagggttagtgccagtgcttacaacgctaaaccgcataaccttgtcgaggcccccattacctgggcaaccagagactccgaaaggggtaatcgtgagcaaa

SEQ ID NO: 32 - DNA, 876 bp, Unknown
  Ga0394878_0025107 JGI
atgtccaaagtattcttaatcgacactgatttacgaccattagaccccgttcatccagcacaagcaagacaattattaagagagaaaaaagcagcagtatttaggcggtttcctttcaccttaatcttgaaggagtcacgccctaattcttctgtttcagtttcacccctcagattaaaaattgatcctggagctaagtttacaggaattgccttagttaacgattctaatggcgaggttgtctttgctgctgagttaaagcacagaggatttgtaattcgagacgctttaatttctagaagacaattacgacgtagtagaagaaaccgcaaaacccgttaccgtcaaccaagattcttaaacagaacaagacctaaaagctggttagctccaagcttacaaagtcgagttgataacatcaaaacttgggttgaaagactaagaaaaatagccccaatcaaagctatcagtcaagagttagtacgttttgatacacagctaatgcgtaacccaaacatccaaggtaacgagtatcaacaaggaactcaatcaacacctgttcttaaaattaaaggagttaaaccattgttaattacagccaatggacatggttctagacaatcatgccgtactgataagtatggatttccatctcgttatgttccacgttttaaatttgttaaaggttttcaaactggtgacatcattaaatctattgtcacgaatggcaaaaagattggcgtttatattggacgaattgctgtccgctcgacagggagttttaacatcgcaacttctcaaggattagtacaaggcattaattacaaatactgtaacccaattcacaaaaaagacggttattcctatgcaacatag

SEQ ID NO: 33 - DNA, 249 bp, Unknown
  Ga0394878_0025107 JGI
gtcaacaacccaccgatttatcgggggcttgaaatacagccctagttgaccagattcaggtagcaatacctacgtttaagggaagagttaatctcctaccttggaatgcgaagctagttccaagctctagaactcaaaggttaaacagccatctgggaggcagtgcttttgagatagtaccgaccttaaacattccttaaacattatcaaagctaacattacccgaaaggaggggcagaaatgtccaaa

SEQ ID NO: 34 - DNA, 1149 bp, Unknown
  Ga0163150_10002834 JGI
atgcccaccgaaaggcatggatgggtgcgccgctctatacggggtgggcaagtcaaagtcgtcaagaggttccccttcacgattcaattgacttacgaatctgaagacgcagttcagcctttgactctaggtcaggatattggatttgggacggttggagtcagcgtaacttccgaactaaaggaagtctttgctgccgagtacaaaatccgcaccgacgtttcagaaaaagtaactgaaagaagatcctaccgcagaactaggcgaggcaataagacccgttacaggccagcgaggtttgacaatcgaaagagaaaagcgttgcagccttcgatcaagcaaaaagtcgagagtcatgagcagataatcaaaaatttgcaaacgatcctgccaatctcaaatgtgattatcgaagccaataactttgatatggccaaaatcaataagcccaacatatcaggacgagattatcagaatggtgaacaaaaaggcttctataatgtcaaacagtatgttctcgccagagatggctatacctgtcaggcagggaaaaaaggctgcgtggacaaacttcacgtccaccatctcacattcaaaagccagggcggaagcgatgccccttccaacctcttgacgctttgtgaaaaacatcatgccgatcttcatgctggcaagcttcaagttaccatcaaaaagcataagacactcaaaaccgccaccatgatgaatatcgtgcgcagccagctactcatacggaatccaggttttacggaaacttttggatatgagacaaaatttgaacgagaactgcttgaactgcaaaaaacccatcacaatgatgccttcgtcatagctggcggcagatgtcaaaggcgagccagggtccatttcatcacgcaaaagcgcaagaataatcgggcaattcagatgaaccgaaaaggccaagcaccagccataaggaggcaaagatacaaaattcagcccaaggacatcatccaatggcgaggaaaaaagtattttgctgggggtatgcaaaacaaaggggcttacctcatgttttggagtgattgtaaggaaaagtatgttaaaccgattgcgcagatcaaaatcatttttcatcaaagaagctatgttctcgacgcgatctaa

SEQ ID NO: 35 - DNA, 295 bp, Unknown
  Ga0163150_10002834 JGI
gtcaatcaccccacccaaccctagcgggtatgggtagggcttggaagaaaggaaacaattttccaagctcttgattgattagactcagccctggcaacagggctacgttactggcgaatgacataggcaccttgggatacttctctagtcccaggctctgcgcgagacggctaaacagttctgatgggtaggaacagtgctttctcgaaaaaccgccggataactttgtcgaagagaatccacagccgaaaggctgccttacaggaacccctaacggggaagaaagaaatagatg

SEQ ID NO: 36 - DNA, 540 bp, Unknown
  Ga0208279_1011523 JGI
atggtgcgcagaggacgcagaactcgcaagacccgctaccgccaaccacgcttcgacaaccggcggcgagcggaaggatggcggcagccatctctcatgtctcgcgtgcagaatgtgcgccattgggcagatcgcttggcggctctcgtaccactcagtcagattgcggtagagactgttcgcttcgacacccaactcatggagaacccaagtatcactggagttgagtaccagcaaggcgaactggcaggctacgaggtgcgcgagtacctactggagaagtggggccgcaagtgtgcctactgtggcgcggagaatgtgccacttgaggtagagcacatccgtccgaagtcgcggcgtggaagcaatcgcgtcagcaacctactcatttcgtgccatgcctgcaaccaggccaaggggagtcgggatgtgcgagagttcctggcacatgatccagcacgattgaaaaggatactggcgcaagccagacagccgctttcggatgcggcggcggtgaacgccacccgatacgcgattggg

SEQ ID NO: 37 - DNA, 373 bp, Unknown
  Ga0208279_1011523 JGI
ggcaaccgctcattttcgaccaggatttcgtcgatccgggcttggtacggccccaggaccggtgcctcgcgtggcgctcgaagtgtatattccttcccctcggccgactcgatggcccttttgactgtcgggcgcgagtgtcccatctctcgggctattcgcctgatgctcttgttttcatgaaagaaagctcgtcggatgttttctcgttcgtccacctttatcatctcctcctccgctatcataggatttgttctcacactgcccataatagcagagatcgtttcaggtggtcctgttttcagtgatcaaaatccggtcaggtggtccccttttagtttatcaaaaacacaaggcggctctggacaagagg

SEQ ID NO: 38 - DNA, 1824 bp, Unknown
  Ga0247609_10000157 JGI
atggtttacgtaatagacaaaaacaatcatcctctaatgcctacgcatcgttacggaaaagtacgcagaatgcttaaagaaggcaaagctaaagtcgtaaaacgagaaccttttacgattaaactgctgtacgattcatgtgattttgtgcagccactagttctcggtattgacacaggaagcgaatacataggaactgccgcctgttctgacaaaggaaatggaaaagtaattttgtattcatccatcgttaaacttcgtacagacatcaagactaaaatggaacaacgtagaaagtatcgttccgcacgtcgtggaaagttacgttgcagaccaccaaggttcttaacacgttttgcgtacactaaaaaagacatcatggacaaactgaaactctgtggtgaatctgtcaagcaaacggttattaaagacggcaaagaagtcacaactacagtgtttaagaaatacaacaagaagcagatacagcatttgaaacgatgcctgtcatgtgcaccagacaaacttcctgactcacagacgacaactctgtctcctacgatacgaagcaagataggttcgcatgtaagagaagttgtggatattagcaggatacttcctgtcagtcgtttagtgcttgaagtcggtcagttcgacacacatgctttgaaaaatccagaactgaaagacatgtcgaatcctgacattcgtgcatggggttatcagcacggacccaactatggttatgaaagcacaaaagcacatgttttagctagggataagtacaaatgcagaatatgcggtgtttccttcaaaggacgttcagggaaatcactgcatgttcatcacattgtattccgaagtaatggcggaagtgatgaccttgaaaatttagttacgctatgtgaagactgtcaccacacactgcataatgatttcaagacgatgacaaaggacgcatttgatgtgaaatacaagaccttgggttctggaaacgcatcaagatggaaagtgttaaaacacgcagctcacatgaatgtcatacgtgcacaacttttacagaacgccgccaattcagtcaaaatggtcgtgaaagattcatcagaacaaaagcatattatctcgttatttgagaatgcaaccgaaacttttgggtacattacaaaagcgaacaggcaatggcatggaatcgcaaaagaccatcatctggatgcgtgtatgattgcatctggtggttctaaattcacggttgacccagatacaccggttttcaagaaacgccatattgaatctggaaattatcaggtatgcgtccgtaaagacagcaatgcggatattatggctgagttcaagaaagcactgaaaaaggaaggtagagaacttggggatgcttcaaagaatgaatacaagcggtttaagaaagcacgtagagagcgtttaaaagctgaatttgagtctttcataagtgataatgcggaacagctcaaaaaatgtaaacgcagatggattcagacggatgtgtcctggtcaacacgcgacaaagttcatggatgtcggctgtattacaaagtcaattactacggtcagtctggattcctcggtgcttgcggactcaaaagtgccgggtatcttttggatgtgttcggtaaaaaattggaaatctcagaacacagaatacgattgaagaaaaagacagtgactgcaaattcgctttccaataaaaaggatgttcgtgtgctgtcggcacggcatactacgttatgcgaccatgaagttccaaaagactggatgcatcaaacgattgttacgtctgtttctgaggtatga

SEQ ID NO: 39 - DNA, 419 bp, Unknown
  Ga0247609_10000157 JGI
acgagtgttatacccaggtgaggtggtgatatggcactgattagtctcagaggtatgacatttgttatgagtgtaatacgacgaaaccgtctgactcaacggatacgtggtctcagaggtatgacatttgtaacgggtgtaatactcttgcccgtaccgactgtctcagaggtatgacatttgttatgagtgtaatacctctaaaacgcctgtaacaaatgtcatgctaatgggaacagactcagctcttcggagctatgcatcaactttaacgaaacgttctgatgcctcctcagtcagttcaattctgtcgatgctttgtcgaggggaagtcgtatcgcccttacgggctgtacgcattacatcggctctcatgctgatggcttacagcaacatctttaacgtggagttctaaaatg

SEQ ID NO: 40 - DNA, 303 bp, Unknown
  Ga0116227_10015234 JGI
atgtccaaagtactagtaattgacaccaacaaaaaaccgcaaaatccaattcatccctccctggcgagacagcttttaaataacggtaaagccgcaatatttagaaaatacccgtttacaggctatgaaacgcgagaatacctgttagaaaagtggaacagaaaatgtgcttactgcgatatcaaagatgtcccgttgcagatagaacacattcattcgagagcaaaaggagggtcaaatcgcatttctaatctaactttaagttgtgagaaatgcaatattttgcaaaaaaacgatcagtag

SEQ ID NO: 41 - DNA, 292 bp, Unknown
  Ga0116227_10015234 JGI
gtcagtaactcaggtctaaagacgctgagcttgtctcagagttttagccacactagctgacccgatgcgagtacctcgtgtactacgttatcggtaagtgtttaagttcctaccttgagatgcattcgccagtttcaagctctagaactgggtgattaaacaggtttatattgagttaacactccttgttgcccagatagtaccgtccgataactttggcattagcgcagcgttagcgagtactcgagcgtcggctaacatcacccagtaatggagggaatttatgtccaaa

SEQ ID NO: 42 - skipped

SEQ ID NO: 43 - DNA, 337 bp, Wastewater metagenome
gttaagttctcactaccctaaagggtaggagcttattgagtttttcgataagttacttaaatagcttaagcatatcgcaatatatgctacgttactaaagaatatataggtacttcagggtttgtatctagcacaaactagatttgactctagctctgaactctacggtataaagctaaacatctctgacgagaaggagaagtgcgatatacattaaaacctttagataacattggcgaagggaagtaacttaaaagattttgtacttaggtacatatgttttaaagagttttatctctacttacaaaaaggagtttttatgattaaaataacaaat

SEQ ID NO: 44 - DNA, 1347 bp, Unknown
  Ga0207421_10008055 JGI
atgcaacgagtttttgtacaaggggttaccggggaacgactgatgccgtgccatccagcccgtgctcgacaactacttcggtctgggcgggcgcgggtaattcgctcccgccccttcaccatcgagatgatcgaccgagccgagggcacggtgcagccggtgcgcttgaagattgaccccggcgcacgggtcaccggcattgccctagttgccgagggcaagaccggagcccgggttgtttgggccggggaactggctcaccgtagtcaggctatccgcaaggctctcgccgaccggcgctcctatcggcgcgcacgccgggggcgcaagtgccgcaatcgcgccccacgtttcaacaaccgcagtcgggtacccggctggttgccgccgagcctccaacaccgggtagacaccacccggacatgggttgggcgactactatcccgggttccggtcaccgctgtggatgtggagacggtgcgcttcgatgtgcatgcgctggccgccgggcggccgctctccagcgtggagtaccagcaaggcaccctgcacggcgtcgagctacgtgaatacctacttcaacgggatggctatgcttgtgtctattgccgaggcgcgagccatgatcctgtgttggagttggaccatgtgcagccgagcagccggggcggcagcaaccgaaccggcaatctggtaaccagttgcaccacctgtaatcaggcaaaaaacaaccgcactgccgaggagtgggcggcggcactggctggcagttactccagacttgaccgcacccgggcagaacgggcggggaagatccaagccggatggagcccgggcctgcgggatgccgccgctatgaacgccagccgctatgccatcggacgcgcgttaaaagaaaccggcctgccggtgacgttcgccagcggcgggcgcaccaaacacaaccgcagtacccagcattatccgaaggcacactggattgacgcggcgtgcgtcggcgaatccggcgaaaaggtgaaactggacccaaaaaccccgatccttcatatcgaagcccgaggtcgcgggcagcgcctagtctgccgggtggatcggtttggtttcccccgcacggctcccgggcgggtgaagcgggtgcatggctttcaaaccggcgacgtagtgcgtctaaaccagccccggggaaagtatcgaggccagcacaccggggcgctagccggtattcgtgcccggggctctatggatcttcgcacctcttctggacagaagatcagtgcctcgcaccaacatatgcgtctgctccggcgattcgacgggtattgctactcggaggcacgggcatgctag

SEQ ID NO: 45 - DNA, 271 bp, Unknown
  Ga0207421_10008055 JGI
gtcgccgctttagccctgcccatcccggcctccgtgccggatgatcagggcagactcaaccagcccgagcctcctttgaggggctacggccgacaggaatagatagtcactccggggtgcttctccagccccggaccatgaggccggtggtcatgctgcccgattgcggtgaagggcgaaggctgccggtgaaaaccctgtcggatcatgggcgaggagacttgaccggccctgcggggccgagactgagaggggtaacgaaatgcaacga

SEQ ID NO: 46 - DNA, 264 bp, Unknown
  GENOME_ID: 238320 MG-RAST
atggtcgtatttgtcaaaaacaatcatggcgaagcactaatgccgtgttcagaaagaaaagctcgcttattattacgagataaaaaagggaaaattgggtttatttcaggattttctggaaaaacgcaatgttatgtgaaaaacatttttggtgattatgtcacgatttcgccaaaatacaaaatggtagggctaaaaaaactaaaccgattagcgcacaacaataattggatacagcaaagaacaccagcgtacgctggctaa

SEQ ID NO: 47 - DNA, 264 bp, Unknown
  GENOME_ID: 238320 MG-RAST
gtcaataacccaccacttaaaatcattttatgatttttgaagtgggggcttgcaaaagcttgattgactagcatcagttcttcgagaactacgttcgttttgttatcatacccgtaggtgattcccaagccgtcggctctatgctggctctgtaaaagtcctgagaggtaaggacggtcaaccagatgtgacagtcacactgttcaagcgtttcgaacatttgcgaagggaaacaaactccaaaggaggaaatacgatatggtc

SEQ ID NO: 48 - DNA, 1335 bp, Candidatus Anoxychlamydiales sp.
atgttagcctttgttttaaacaaattaaaaaaacctttgatgccttgctcttcggctaaggctaaaaggttactaaaaaaaggtttggccaaagtcatatcaaaaaaaccatttacaataaagttgctttttggctctagcggacataaacaagaagttattagtggaatggatacgggttcaaaaaccattggcatagcagctattgccaatggaaaaattttgtatcaagctcaaacaaaactaagaggcgaagaaattaaaaaaaagatggatcaaagaaggatgtacagaaggagtaggaggagcagaaaacttcgttatcgaaaacctagatttttaaatagaagagcaagtacagctattaataggctcgctcctagtgttaaacataaactactctctcatctaagagaaaaaaagtttatcgaatcgattcttcctgtaagtatgtggattgtagaaactgcaagttttgacatccacaaaatcacaaatccgaaaggggtttcaaaagctttaggtaaaggccggacttatcaaaagggcaggatgttagatttttataatgtaaaacaatacgttctcaatcgagataagtatcaatgccaagtgtgtaaaaagaaaaataatcttaaattgcatgttcatcacattcaatttagatcaaacggcggctctaattcacctgacaacttagtaattctttgtgaaacttgtcatgacaaactccataagctaaaaaaagaagaagctgaaaaatcttcaaaaaaattacaaaaaagcgcacaaaaacagactaaacatgcaacagagtcttcaattctcagatcacaactttgtaaacattttaaaaagcttgaaagttctcaagtatttgaagaaacttttggctatattacaaaatttaacagagagagagctcttcttcccaaatcgcattatatagatgcaatctgtatcgctagccgggggaagatacctgagatgcatattcaaaataacacctcagatctttttcttagaagatgtgtttcaaaaggcgattataaacaaagaagaggaatttgttcggaactgaaaataccaaccggaaaactttttggattaaaaaaatttgatcttgttaagacttccaagggagttggatttgttaaagggaaaagaagctccggtttctttgccatttcagatatcaatggaactctcatctctgatagtgtaaacattaagaaaaacataggccggatacaagctaggaaggccgttttaacttggaggtcgcaattcctccctgacctaaaggacagggtttccttgcgagaaaaaagatga

SEQ ID NO: 49 - DNA, 314 bp, Candidatus Anoxychlamydiales sp.
gtcaatcacccctccctaaaggaaggggcttgaaccgtgaggattaagggcaactggttgaccagaagacaaactcaaggagttttattaatgtttgtaaccgttaagacagagaaaagacaacagaccaacgagtgccacctcagcttgttgctctctgctgtgcaattaaacaaagtccaaagacttagtgttgcccaggaaaaaacctgttttaactcttcgagaggaggacttgacgatctattggttgctccaaccggctggatcgttgagcataaccggtttgtttgtaccgggaaggctttatgtta

SEQ ID NO: 50 - DNA, 1233 bp, Unknown
  Ga0172380_10022713 JGI
atgtcaagtaagaaatttgcttttgttgtagatattaaaggtaagaaattagcacctacacctgataataatgcatggtatttaattagaaaaggcagggctaaattattacaaaaattccctatggttattgaattacaaagagaaataccaaaagaacaattagataattcagaatatattgttggtatagacgatggttctaaacatgtcggtatttctattattcagaaatgtaaatataagactaaaactatatttaaaggaactttagaacaaagaaatgacgttaccaaattaataagtttaagaagatcttatagacggcatagaagagggcaaaaaagataccgtccagttaggtttaataatagaagttcatctaaaagaaaaggtagaatacctccatctattaagcaaaagaaagatgctattttaagagtagtaaataaattaaattcattacttccttctatatataaaatatttttagaagatgtagcaatagatattcgtgtattacaagatggtaaaaagttatatggagggcaatataaaatttctaatagattagacgagaatattcgtaaagctgtattgattagagataaaaattcttgtatgaactgtggtagatctaattgtaaacttgaaatccatcatataattcctaaaagaatgcaaggaaataatactatggataatcttatatctctctgtgagaaatgtcacaaagaggtaacaggacaagagtttagatttataaataagtttcaacaattaatcaaaggtaaaaacattcgttttgattatgctcaacatgttatgcaaggaaagacttatttaagaaataatttaagagatatagcagaagtaatcctaactactggaggagatacggctaacaaaagaataaatttaaatattgaaaaatctcattctaatgatgcagtagtaattgctggaggtaatgaaattacactttatgattgggttattaaacctctacgaaaaaaatcaaaaagtaaagggtatataattaatggttttagatgtagagacattgtaaaatatactaaaaaaaatggagagtcatataaaggctatatcacaagtcttgatccaaaaagaaatacttgcaatattactacatttaatggtatgcaattaataagatatggaataaaaagattgatcttgatagatcgtccaaaaaatgtaatatggatttaa

SEQ ID NO: 51 - DNA, 289 bp, Unknown
  Ga0172380_10022713 JGI
aacagtaatttcttaagtggacacatagtctttagaaattagttgtttgagtgctttctagcctaagtgagtgtaaaaaatcgaaagatttttagcacgatgaactacgttagcggacaaaggcaaagacacacctttagatgtatccagcagtcttaagctctgtgagtattgaggaagaacaatttctaatgtcctgaagttaatcaccaaaaatacatgtcctcccgctgacattggcaagcaggaaaattcctaataagtgggtgacagagatgtcaagtaagaa

SEQ ID NO: 52 - DNA, 1281 bp, Unknown
  Ga0310695_10007302 JGI
atggtttatgtattagataaggatggaaaccctctcatgccaaccaaacggtatgggaaggtaagacatcttctaaaggatggcaaggcagttgttgtcagacgtgatccgtttacgatacggcttacatacgacagcgggaaacacacacagcccgtaagccttggcgttgatgcaggaagtaagcatatcggtctatctgctacaactgaaaggaaagagctgctttctgcacaagtagatttaagacaggatatcagtaagttgctcatggctaggagagaaacacggcgtagcagacgtagcagaaagacacgttacaggaagccacgttttcagaaccgtgtccatagcaagcagaaaggatggcttgccccatctgttcaggcaaagtgcgatacacacgttaaagtcgtaaaggatgtatgtaggatactccctgtaacaactataacgattgagatggcaccttttgatacgcagaaactgaaggcagacatccttggtatgaagactccttcgggaactgactatcagcatggggaagcagaaggctttgataatatcaaagcttatgttaaatggcgtgatggttataagtgtgccgtatgcggtgcagaacacgttcaactacaggtacaccacaaaaagcaacgcaaggatggcggtacggatatgccggcaaatcttataaccgtctgtgctgactgccacaaggcataccacgcaggaactcttactggcagaaaatccgaggtcatgagacctgacacaaagataaagactatgcaggatgcttcgttcatgggcatcatgagatgggctgtctggaacaggctcaaagcactcggtatcccgctccacatgacgtacggttataagacggctgaaaagcgtaagcaatgtgatttgccgaaagatcaccgcattgatgcaaggtgtataagcggtcaccctgacgtagaacccgctggtgaatggttcttctgtaagaaggtgcgatgccacaacaggcaaatacataaggtcaagacactaaagggcagcatccgtaaacgcaatcaggcagaacacgagattaaaggcttcagactgttcgataaagtcaaatgtaacagtacggagtgctttatcttcggaagacgttctgccggatacatggatgtgcgtacgcttgatggaacaaaaataaatgcaggtatcagttataaaaaactcaaatttgttaaccctgcaaaacatttactcatagaaaggaggtgcgtctcctcccgcgactaa

SEQ ID NO: 53 - DNA, 309 bp, Unknown
  Ga0310695_10007302 JGI
gtcaatgacccatgactaaagtcacgagcttgtaatcaaaagctccattgactagcctaagccttgaaataaaggctacgttagatatgttatcacacccgtgggcgtagcacctaacctacggctctgtgcgggccctgtaaacagcggtgagagggtaaaccgcagtcaacccaagatgaccgagtacggaaagcatttctaacattggcgaaggtgtgacaactgatatggtttttacatctgaaattcagaatgtaagactgtagtaaggcttactgtttaagtacagtagaaaggtaacttatg

SEQ ID NO: 54 - DNA, 879 bp, Unknown
  GENOME_ACESSION: mgm4547164.3 MG-RAST
atgaaacattcatacgttgcttttgtaatagccatggacgggacaaggctgatgccatgcctgaatccaaagaaagtacgtagattgctgaaaagcaggaaagcggtcattgcaaaatatgacccgttcacgattcagcttacatatgaaacgactaatgaagtacagccggtggagctgtccgtggatacaggtgaacaacatattggcatatccatgaaatcagaaaaacatgaattcgttcatgaacaaagagacctgcttgcggatgagaaatcacaccacgatgaccagaggcgctatcgcagggcaaggcgtaaccggaaacgttacaggaaagcccgttttgataacaggcgcattccaaaaggctggctggcaccgagcctggaccacaaaaaagaacaacacatccggctttgcgaaaaatacgtcgatgtagcaccggtcacagccatctggctggaagccggacaattcgatacaacggcgctgcaccttgcggaacaagggctgccagcgcctagtggtacggattaccagcagggaccgcggtttggctatgataacctgcgggaagccgtcttttacagggatggtcatacctgccaggtatgcggttcgactatcgggaagattaagaccaaggaaggttataagtcaggtacggtcatacttcgaatgcaccatattgggtataggaccggtgaccatacagacaggatgagcaatctcctgactgtttgcaccaggtgtcacacctcggcaaatcaccagcctggcggcgctttatatgacttaaagccaaaagccaaaactctgaaaggcgccgcgttcatgaacacggtcaggtggtacatagttaatgctttaacctaa

SEQ ID NO: 55 - DNA, 421 bp, Unknown
  GENOME_ACESSION: mgm4547164.3 MG-RAST
gtcaataacccccactaaatcgctgcggcgattttgagggggcttgacaggaatttcaatgaattgcctttgggtgaatcattgcctgacctgttaagcccgattgattagccccttcctgtgctggcaacagtacggaaagagacgttacccgtaaataacatagtcacgccagggtgcttcacaagctctggccactgagcctgttacattaaacatccctgagggtaggggaagtgtgtacagggtatacgtaagctgtttcctccgggacatggcttatgtatataaaactgcgggataacaagggcgttgtgaaccacgtccctacggggatagatgctgtacatgctctttatgtacagaaggcgtaagccaatttttcaggaaggaggcagcagccatgaaacattcatacgtt

SEQ ID NO: 56 - DNA, 1368 bp, Unknown
  GENOME_ACESSION: mgm4547164.3 MG-RAST
atgacaacaatagtttatatattgaacaaagatggaaaacctttaatgccaacagaacgacacggaaaagtccgaaaacttttaaacgaaaataaagcgattgttgtaaagaaaattcctttcacaataaaattgctttatgaccaaacggaatttacacaacccatcacgctcggtattgacacaggtgctaaacatattggtatttctgcaaccacagaatcaaaagaattatatgcaggagaacataatcttcgtgatggaaaaacaagtgttacatcacttatgacaaagagaagaacattaagacgagcaagacgcaacagaaaaactcgttatagaaaaagccgatttgaaaatcgcaaaagaaaacctacagatggattcgacaaatggttaccaccaacaatacgcacacagattgctggtcatgaacatgttatacaagaagtatcaaagattcttccaatatcacatatcatagttgaaactgcttcgtttgatacgcaacttttaaagaatccagaaattcaaggaattgaataccaacaaggagaaatgagtgattggtcagctaacttaagagaatatatacttgcgagagacaattacacatgtcaatggtgcaaaaaaagttcattccaacatgatttggttctccaaacgcatcatatacagtttagaagtaatggaggttctaatagaccggacaacctcataacgctgtgtttggactgtcatcaaaaactccacaccattacaaaagaaactggaaaaattcctattgatttaagaaaatcgccaaatcttaaatgtgcagcatattcatctattatgaaatatggaatctttaatatggcaaaaaagtatgataaaaacgcaaacatgacatttggttataaaacaaagaaaacacgaatcgacacaaatcgaaaatttggattacatcttccgaaacaacattatattgatgcaagatgtataaccggaaatcctacagcaaaacctcttggtcaaatatacgtttcagaacaaagacgatgtcataatcggtccttctttgacacagtacctattaggatacctaaaaaaccaaatgaaaaagcacttatcaaaaataactcatatttcagaccccaaatagtcatgaccgatatccttggatttagagacggcgatataatagaagctgataatactctatacatggtaaaaagacgcggagatttaaaaacgcgtgtagcactcggatgtattcgttggaatagcgatgacactacactagaaacaatctcctcaaacaaagtaaagctctggtcaagaaataaagatagaattgtaattctaaaagaaaatattggaggataa

SEQ ID NO: 57 - DNA, 302 bp, Unknown
  GENOME_ACESSION: mgm4547164.3 MG-RAST
ataaaacctcaaacaatagattcaaacacatattatttaacaataatcataagattatactaaaacaagactaagttccaaataaggaactacgttatgtgagaatatatagttacctgtcgatagaagccaagtcttcagctctaaggtcttagtttaaacagtcctattaggtagggacagtgattaagacatataaaacctcacaataacattgtcgatggctaccattacgagttatgcatctcggcttacagcaataaaatgcatacgataataacaagaaaggaatgacaacaata

SEQ ID NO: 58 - DNA, 1287 bp, Unknown
  Ga0255336_100223 JGI
atggcagtattcgtactggatcgacgcggcagaccattaatgccgtgttcggagaaacgggctcggctgatgcttgagcgtcagcgagcacgcgttcatcgcgtgatgccgtttgtcattcgtcttaccgaccggctcctcgaggaaagcacattgcagccggtacgcattaagattgaatccgggagcaagataaccgggctcgcactggtgcgagaggatggcgagtcgaccgccgttcttaacctgtttgaattgatacatcggggtcgtcagatcagcgagggcctatctgcccgcagcaacttccgccgacgcaggcgcagcgctaacctgcggtaccgggccccacactatgccaatcccgcacgaacaagtggttggctcccacccagcttgagacatcggatcgacacgacgaaatcatgggtgacgcgttttatccggtgggcaccagtgagcggacttgttagcgaactggtgcgctacgacctcgcagcggcagaaggtgacgagagagcctccgacaataaggagcatgctgaaatcgccgcccaggagatacgcgcgtatctcttggataagtggggacgccaatgcgtttattgcgataccgatcgccaacatctgcagattgacccgatcgatcttcgtacggcaggcgagccggcaaggcacatatccggtttgatcctggcctgtacttcctgcatcgcgcggcgagctggacgtgacattggcgagttcgtcaccgatcgggcgcggctcgagcggctgcggaactggacaaaagcgccgcagagagatcgcgcggctgtagatggcgcgcgttcggccatcgcgcaattcctcgcaacgacggggctccctgtcgagctgtccagtggcggacgcacgaaatggaaccgtacacgccttgctcttcccaagtcgcaggctctggatgcggtatgtgtgggcgcagtcacggctgtcgtctgctggcgtattcccgtcatcaagataaagtgtacgggccgaggccgataccagcgaacacttgtgaacgcgtatggcttcccccgtgcccacctgatgcgcaacaagcgcatacataacgttcagaccggtgatcgcgttcgcgccaccgtcccgaccggcaagaaagctggtatccatacggggcgagtggcggtccgttcgcgcggctattttgatgtgcacaagccagacgggccggttactgggattcaccatcgatactgcgtcgttttgcagcgggctgatggatacagttattcgatgtaa

SEQ ID NO: 59 - DNA, 270 bp, Unknown
  Ga0255336_100223 JGI
gtcaatcgctccggcctaacggccgaggcttgcaaaagcctgaggttgaccagccagagccctgcaaggggctacgttgtgcagaagttcaagacccactccgcgatgcttcctcagttgcggacactggaacctgcggcagtagacacgcttcgagcaagcacgaaacgggtcgcggggtaacgctgctgtacaacattggcgaggggagcggagcccgaatggctcccgtaacaaggttccgtaagggacaattgagaacacatggca

SEQ ID NO: 60 - DNA, 1275 bp, Okeania sp. SIO3I5
atgtccaccaattatgtatttgtacttgatgcaaataaaaagcctttagcaccatgcaaggcaggaatggcaaggtcattattaaaagcaggtaaagccaaggtttttaggcgctatccattcagcataattctcaataaattggtagcagaaaaacatcaggatttacagctaaaaattgaccctgggtctaagcaaacaggttttgctttagtaactcaagaaggggaagttatttgggcgatggtcttaatccatcgaggtcaacaaataaaaaacgctatgcttaggcggcgaaatcttcggcgaggtcgccgccgtcgaaaaacccgctatcgacaaccgcgttttcttaacagaaagcgtaaaaaaggatggctgccaccaagtttaatgcacagagttttaactgtagaagcttgggttaacaaattatgcttcttagcacccattaattccctagcaatggaattagtaaagttcgatacccaaaaagttgaaaatcccgaaatctctggaattgaataccagcaaggaactttatcgggatacgatcttcgcgaatatttgctcttaaagtttaatcgcaaatgtgtttattgcggcgcaaaagatactcgcttagaaattgagcatacaactccccgttcaaaaggtggaagcaatagggtgtcgaatctagttattgcttgtcatcaatgcaacaaagataagggtgctatggatattagagaatttttgaaggataaaccatctcttttggaacgagttttgaaacaagccaaaacgccattaaaagatgcagcagcagttaatgcaactcgttggaaaatctttgaaactttaaaaaagacagaactacccgttgttaccgggagtggtgcgcaaaccaagtacaatcgtcgtcgattggatttaccaaaagaacattggatagatgcagcgtgcgttggggaagtagaaaaattaacaattcttacggctcaaccattgattgttacagcaatgggacacggttgcaggcagatggtacaaatggataaatatggttttccccgcaaaggttataaggctacaaaacctgtccctggttggaaaactggagatattatcaatgtcgtaaaaggccaaaatattggactaaaaggagtcaggattaaaactgtaagaagtaaaggcaattttgatatccgacatcaagatgaaattttgtctgtttctcgaaaccatatccaacccgttcacagacgagatggatacaattactcgttttga

SEQ ID NO: 61 - DNA, 253 bp, Okeania sp. SIO3I5
ataaagactaaccacaaatctaatcaaaacgcttatttgtgtttaaatggttagtccagcctacttttttaaggtaaacgttattttggtcacaatacgtcggaatgcgcggccagttccgacctctattgctcggcattaaacaggcaaagagacttgaaaagctagtgtgtcgagcctaacaagccaaaataaccgggcgaggccaactttacatttctataggagggacgcaacaatgtccaccaattat

SEQ ID NO: 62 - DNA, 531 bp, Unknown
  11783J13700_1016113 | JGI
atgttacgagtaccagttctatcaaagtcaggcaaacccttaatgccgactaaacctagtcgtgctaaccagacaccagagacacacgctgttgatggtgtgagcctagcggcgtttgagtttattcaatggcgggagcgatattctaagaatgccaagcatggcaactgggagggtggtgttcatataacaccagcgccgtttacggtaatccgcagaccacctattaaccgccggcagttgcacctatttgttccatccaagggtggcaagcgacgaaagtatggcggcacggttactcgtcatagcttcagaaaaggagacaaggttgtagctgaaaaagccggaaaaacctatacgggctggtgttctggagacaccaaaacacaggtttctgtttctaacggaaactggaaacgaattgggcagtttactgccaaaaaagtcaggttgttgcagcgaagcacgggtttaatcgtcgtgccttcaactggattgtcaaatcttaccactcaaagtggtaagatttga

SEQ ID NO: 63 - DNA, 313 bp, Unknown
  11783J13700_1016113 |  JGI
ttcaataaccccaacttacttcgttgaagttggggattgccggacaaacggactgtttaaaccgttgaataccacatagagtctcggtttggtacaaactctcggatgcctccctagtccgagttacatttaaggctttttgtcgagtcgctgttaagtcaggacatcttaaccgagatggtgggaagggacatagtggtcagtggtcagtggtcagttatcagtggtcagtaattggctgataaatgataaccgatacctggtaactgataactgataacttaactcgtgaggtttatcacccatgttacga

SEQ ID NO: 64 - DNA, 783 bp, Symploca sp. SIO2C1
atgcgagttttcgttctagacaaaaaccattatcctcttgacccctgccacccagcacgggcgagagaactactacactcaaggagggctaaagtatacagacgctatccgtttactattgttttgcaagacagaacggttgaagaatctacaactcattctcatcggattaaaatcgatcctggtagcaaggttactgggtttgcagttgtccaagaagagacaggacgtatcacaaacgcccttgaagtctctcatagaggacaacaaatcaaagattctcttgagtctcgtagagctttaaggagaggtcgtcgtaaccgtaaaacccgttaccgcaagtctcgttttcttaaccgcactcgtaaacaaggctggctaccaccatcacttgagagccgaatttccaatattgaaacttgggtcaggagaattagaaaattgtgtccaatcactgcaatttctcaagagctagtcaggtttgatttgcaacagattaaggtagcggcaaaaggacacggaaccagacaacgatgccgtcctgataagtttggattcccaaaagctcatgctccaaaggctaagtttttccaaggctttcaaactggcgatatcgttaaagccgatgttcaaaaaggtaagtttacgggtcaatatgttggtcgaattgccattcggttcagaccgagttttgtcctgcaactaccgaatcaaaagtttgatgttcaccccaaatacctaaaaactatccacaggaatgacggctatgaataccaattctga

SEQ ID NO: 65 - DNA, 262 bp, Symploca sp. SIO2C1
gtcaacaactcaccgttaagttctagcgaactataacgggagcttgaaataaagctctagttgaccagactaaggtttgaaataaaacctacgttcagagtaagagttaaagttcctaccttaaaatacgtgccagttttaagctctagaactagaaagttaaacatctgtagttgagttaaggaagtgctttctagatgtaccgactttgaacattgtcgaggctaactttaccagaaatgagagtctcaaagtaatgcga

SEQ ID NO: 66 - DNA, 756 bp, Burkholderiaceae bacterium 16
ttgcagacaagcggcagggtaagcacgaaacggatccgggcacatcgccggttctcaacatgccgaggggagacctcccggaagggaggtgtttcccggcccgtaacaatgagggggattgccatggcagtcattgtgttggacagaagcagccaggcgtcgatgccgtgcagcgaggagcgagcccgccagctctccgagcgcggtcgcgcgtgcgtacaccgcctgatgccgttcgccatccgagatcgccgccgagcggactgcatcatcccgccgatgcgcatcaaactcgatccaggctgcaatgtcactggcatggccgtcgtgcgcgcggtcgatgccaatggcgctgcaccgaggcgccatgccgtcgcgctattcctggttgagccgatccaccacggcatgcggatccgaccgaatctaagtgtgcgcaggcgccatgcaccaaccgcgccgcagctgcaagccccgttatcgcgccgctcacttcgacaatcagcgccggcccgcaggctggctggtgccccgcctgcagcaccacatcgacacgacaatggcctgggtgcgcgcaccaagtacaaccggcggcgccttgatctgcccaagacccgcgccatcgatgcactgtgcatgggcgctgtcgtgtctatccagcattggcaggtaccggtgcagcccatcaaatgcgtcgcacgcgactcggcaccgtcggcttcccgcacggcgacctcatgcgcagcaagcaggtga

SEQ ID NO: 67 - DNA, 242 bp, Burkholderiaceae bacterium 16
gctgtcaacccctccctgacggatggagctctaaggcagctccgctacgttgtcaacaggggcaagaccaacgttgggatgcttcactcagtcccaacctccgcaagccccggttgcagacaagcggcagggtaagcacgaaacggatccgggcacatcgccggttctcaacatgccgaggggagacctcccggaagggaggtgtttcccggcccgtaacaatgagggggattgccatggca

SEQ ID NO: 68 - DNA, 435 bp, filamentous cyanobacterium ESFC-1
atgcaacgtatcccagtacaaaaccctgacggcacaaccgctatgcccacaaagcgcacccgcgctgaaaaatgggtaaaacagggtaaagcccagtgggtcaaaaccgacctccgaatcaaagctgtccgcctacgcactgttacccgacacggcttccgaaaaggagatttggttcgggctgaaatggcaggacgcatctccatgggctatgtgagtggtgacaccgcccgtcaggtgtctgtatctgatttcaattggaagcgaattggccagtttaccgcttccaaagttcaattactcgatcgcgcaacgggcattctggttacttgcccgaagatattgttagtcaacggggcaaccccgccgactaacgctcctatccctctctcacctgctgcgcgaggtgggggtatcaaaggagttttttcatga

SEQ ID NO: 69 - DNA, 224 bp, filamentous cyanobacterium ESFC-1
ttcaatgacctccaccgactacgcgcgtgtatgggggagcgatcggagataacccggtcgtagctgcgaataggctattcaggttagtgcggcaacacttccagccgcttctctaggttggattatctgtaaggccctggaatctcagggagtggtatcaaaccagacacaccgtactagctggcttaagagacctgtagttggggaattatcttccatgcaac

SEQ ID NO: 70 - DNA, 1356 bp, Erysipelotrichaceae bacterium SG0102
atgagcgtatgcgttgtagcgccggataaaaagccgctgatgccgacaagcgagtaccgtgcaagaaagctgctgaaaagcggcaaggctgttatctttaagtataagccgttcacgatcatgcttacaagaatcgtaagcgagaatatgcagccgatcgagtactgctgcgatacgggatacaaacatattggtgtatccatcaaatcagaaaaacacgagtattttgactgccaatttgacatgcttcaggatgagaagaagcggcacgatgaccgtcggaaaatgcgccgcgcaagaagaaacaggcttcgctacagaaagccccgttttgataatcggacagcttccaaaaaggaaggatggctggcgccgtcgctgagaaacatccgtgatcagcatatccgtatttttgagcggttccttgaggtcatgccgatagtctcagccacgtttgaaatgggctcgtttgacgtccacgccatgcatgagtttgaggcaacaggcaccgtgcttaaaggcgatgattatcagaaggggccgcgatacggcatgaacacgctgagaaaagccgttttctatcgtgacaattacacatgccaggtgtgcggggaaaccgcggatgaaggcgctattctgagagtgcatcatatcggcttcgaaacaggcgatcatacgaaccgcatgagcaatctgctgaccgtctgcacaaaatgccatacttcggcaaaccacaagccgggcggaaagctgtacgacctgaagcctaggacgaagccgtttaacggcgcagccttcatgaacgctgtcagatggcagatgttcagaacgctgaaaagcacccaccctgatttagaatggcacatgacatatggcgctgctacgcaggaggcaagaagagtcctacaccttgaaaagtcgcatgccaatgacgcctacgccatgggagaattccatccaagacgcaggacgccttttatgcattttcagaagctgagacggaataaccgcatccttgaaaaattctttgatgcaaaatacgttgatgcgcgagacggcaagacaaagaaaggtgcagagctgtcatgcggacgcacagacagaagcgagtcaagacactccgagaagaaccttcgcgtattcagagagcggaaagtttcgaaaggcagacgcgtgatcagaagaagccactataaactgcgtcctggcgatactgttgttattggcggagagaagcatagggcaaagggcgttcataacaaaggcacatatgttgtgacagacgccaagaagtcagtgcctgttaagaaagtagagaagattattcatgcaggtgggtatatgcctgttaaatag

SEQ ID NO: 71 - DNA, 338 bp, Erysipelotrichaceae bacterium SG0102
gtcaactacccgcgactaaagtcgcaggcttgtctcgcgcaagtctaagactggcgtcggtacatatgtactagctgattagcctaatgtgtttcgggcactacgttatccgcaaaaatacaggcacctggggattcttcccacgtccctcgctctgcgggcatgcattaaacatctctgacgtgcaggagaagtgtgcatgtcatacacaactgcggataaccttggcgatgggaactaccctgaaagggagaaactgcatatatactgcctctggcaagcgtatgcaggcgtgcgtaagcgcacacttattcatcaatcttagctcagctgattaa

SEQ ID NO: 72 - DNA, 1254 bp, Unknown
  Ga0075125_10000791 JGI
atgttagtatatatactgaataaacaaggtaaaccattaatgccttgtaaacccacaaaagcaaaacaccttctcaaagaaaaaaaagctagagttatccaagtagaaccatttatcatccaactattgtttggatcaagtaattatagacaaccaataacattaggtgttgatccaggataccaaaatgttggtttatctgctatatccaataaaaaagaaatataccgaagtgatgtgcaattacgaatagatatacccaaacttttaatggaacgcaaaatgtttagaaaaaatcgcaggaacagaaagactcggtatagaaaaccacgttttgataaccgtagcaaaaaaaacggtcggcttgtaccaagtatcaagcacaaacttgatagtcatattcggttagtaaatgcagtcgaaaaaatattacctattactaaaattattattgaggttgcatcttttgattcgcagaaaatgcagaaccctgagatatccggagttgaatatcaacaaggaactctgcatggttatgcagtaagagaatatttattggaaaagtggagtagagagtgtgtctattgtggaaaaaggaatgtacccttggagatagaacacattgtgccaaagtcaagaggtggtacagatagagtatcaaatcttacattatcatgtcacgaatgcaatcaagaaaagagcaatatgactgcagaagagtttggacatccagagattcagaaacaggcagaaaaatcgttgaaggctacagctttcatgaacattgttcgttggaaattggtaaatattttgaactgtaagcatacatatggtaatataactaaacgcaacagaataaaaaatgatattgtcaaatctcatagtaatgatgcttttgttatagctgggggtactaaagatgtggatcgatcagatgttctcatcaaacaaaagcaggtacgcagaaacaatcgcaaactggtcaagggtcagagaggtgagatatctaacaaatgtccaagagaagtattcggattcagattgtttgataaagtagtatataataacaagaaatattttgtttggggacgtaggaaaggaggatcttttttgcttaaaactttatctggtgataaaattgagagaacatataaaaagttacaaaaggtatgtggtcaggtttcttttcttgttgagatccaattttcatccattctaaacgaaggttttttaagaggtataatcaatgaataa

SEQ ID NO: 73 - DNA, 236 bp, Unknown
  Ga0075125_10000791 JGI
ggtcaacagccctattctaatgaacaaatcttatgaagttgactaggaggcataatatgcagacgttaagaagaagaaacacatacacaccttaccgtaccactctagcggcaagctctgtgaccatgcaattaaacagacctgttagggtagggttagtgttgcaaagtctcaaaactcttcttaactctccgaagagaccattactcggaaacaggaggtatactttatgttag

SEQ ID NO: 74 - DNA, 1005 bp, Unknown
  Ga0180109_1294567 JGI
atggcagttttcgtattggacaagaggagcaaaccgctcctcaatcgcaggaggcccgcgggctctcttgcaccctccctgcgccaccgagtcgatacgacgatggcatgggtgcagcgtatctcccgatgggcacccgtgacagcgatcggtacggagctggtgcgttttgatacccaggcgttgcagaacccggacatcgaaggcagtgaataccagcaaggcgaactcgccggctatgagctacgcgagtatctgctggaaaagtggggtcgctgctgcgcctactgcggcgcgacggatgtgcccttgcagatcgagcatatccacccaagggccaagggcggaagcaaccgcgcggccaatctcacgctcgcttgtgtgccctgcaatacggcgaaaggggcaagggacgtgcacgagtttgtcaaggacgacacgcgcctgaaacgcctcctcggacaggccaaagcgcccttgaaggatgcggcggcggtgaatgcaacccgccggatgctttgtcgtgccttgaaggccaccgcactaccggtagaaatcggctcaggcggccggacgaagtggaatcgttcgcgtctcggcattcccaagacccatgccctcgatgcggtctgcgtcgggcgcgttgaagcggtgaagggatggcagatcgccgcttggcaactcaaggccaccggacgcggaagctaccagcgcacccggctcacgaaatacggttttccgcgcggctacctgatgcgcgaaaagcgggtgaagggtttccagacaggcgatttcgtcgtggccgcagtaccgagcggcaagaagactggaatctatactggccgcgttgccgtgcgaaaatccggcagcttcaacattcagaccgcatacggcgtcgtcgaaggcatcggccacaagcattgccggcggattcagcggtctgatggctatgggtattttttacaaccatgggccgtaacaaaaggagagcgggagggactttcg

SEQ ID NO: 75 - DNA, 298 bp, Unknown
  Ga0180109_1294567 JGI
gtcaatcaccccggcctaaaggctggggcttgagggggcaaccccaaaagcccgagattgaccagggaaagcggtagccaatccgctgcgttgcaacgaagtacaagacccacatacggatgcttcctcagtccgtagcactggaagcggcagatgcagacaaggtccgggtagctacgaaacggtctgctgtaaggcgaaaacccaagctgcgttgcaacattcccgaggggagcggtgctgcaaggcacccgtaacaaggcccgtaagggcattttagtggacaagaacgatggca

SEQ ID NO: 76 - DNA, 1485 bp, Unknown
  Ga0073583_1167572 JGI
ttgaacgcgaagttaaagaccgacggtagggtgcttcctcagccctgccctctcgaagctcatgctgcagacaacccggatcagggacgaaacgggtgtgggcgcgatgctgccgttcaacatggtcgaggggagcccaacggaaccgtcaagccgttggcgtcacgggcggaagcccagtgcggcgtaagccgcgtatttgtgctggatcgaaaggggttacccttgatgccttgtcatccagcccgagcccgcaagctactcaggaacggtagagcgcgggtccatcggctgattccgtttacgatccggatcgtagatcgagacgtcgaagacagccaactgcagccagttcggctcaagttggatcccggttccaaggtaaccggcatcgcgatcgttcgtgaggacggtgctgatcagcatgtattgcacctggccgagcttcaccaccgaggacaggtcgttcgcaagaaaatgcaacagcgtgcgatgtaccgtagacgtaggcgttctgctaacctccggtatagacagcagcggtttggtaatagaaagcatagacttaaaatcggaggaaaatggctaccgccgtctatacatagttgcgtaagtaatatacttaattggtctgtaaattacagagggtggtgtccggtttccggacttactgcagagaccgccaaattcgacacccagttgatgcaggaccccgagatctcaggcatagaatatcagcagggcgaactccaaggctacgagatccgggagtatctgctggagaagtggggcaggatgtgtgcgtattgtgctggtaaagacatcccgttgcaggtggaacacgtggtgtcgaaagctaagggcggctccagccgtgtcagcaatttgacgttggcctgtggtccctgcaaccaagctaagggtgctcgggacgtccgtgagttcttgcaggggcgccctgccagattggcccatctactgtctaagacgaaaaggtcgctgcgaagtgcagcagtaatgaactctacacgtaatgctttgctcggtgcattcgcctcggcgggttttttggtagacacagctacaggaagtcgtaccaaatacaatcgagaacggttacgcgtcgcaaagacccatgcccttgacgctgcttgctgtggtctagttagccgcgttttggggtggggacagcgtgtattgacaataaaagctcagggccgaggaaaataccaaagaaccaccacgaccaagtatggcttccctcgaagctattcgatgaggaaaaagaaagtacatgggtttcaatctggtgatcttgtacgcgcagtaatcaccaaaggaaaatatgtaggtatacaccaaggaagtgtagtggtccgctcgcggggctttttcgacgtaaagacaccagaaaaaattggtgttaattggcgctattgctcactacttcagagatcgaatggctactcttgtagctacagctaa

SEQ ID NO: 77 - DNA, 233 bp, Unknown
  Ga0073583_1167572 JGI
gctgcagtcagacgatcttctcttcggagaaagccccatgggctcatgctgaccagaccaagttcacagaaggctgacagccgcaaaaggaactacgttgaacgcgaagttaaagaccgacggtagggtgcttcctcagccctgccctctcgaagctcatgctgcagacaacccggatcagggacgaaacgggtgtgggcgcgatgctgccgttcaacatggtcgaggggagc

SEQ ID NO: 78 - DNA, 957 bp, Unknown
  Ga0070741_10072506 JGI
atgtcaaaagttttcgtgggagatacccaccgaacgccgcttgatccggttcatccgggccgcgctcggcttctgctcaagcaaggcaaggcagccgtgtttcggcgctctccgtttccgctcctcttgaaggtgcagggaacctatccgaagccacagccgctgcgagtcaagatcgatcctgggagcgacgtccccggtctggccgtcctggatgacgccacgggcaaagggatctgtgcggtggagttggggcaccgtgcaggcacgagtatgcatgcactggagagctgcggagcaggccggcgctcgcgccggcaacgctacacccgttaccgccaggcaagatggcgcaatcggcgggccaggtatcgcactcgcgaatgccagggtcagccatctcttgcactgtctctggagagcagactcgccaatgtgctgacccgggtgcaacggcttcgtcggttcgcgccgattcctgccatcagtcaggaacgggtgacgtttgatatgcaactggtgagccatctcgaaatcagcggcgaagaggaccaccagggcgatgtacggggccttgaagtgtatgagtatctgctcgagaagtggggcaagccaggtgcctcctgcgcgacaaaacacgttccgctccagattgagcatatgctggtccgcgccaacggcggaaccgaacgggtgagcaatcgttgcctggcctgtgagccctgcaatctcaccctggcgaagaagccggaggtgcttgagcgtatgctggcacaggccacggctccgttgaaggatgcggcggccgtggatgccatgcgaggggcaccgtatcggcggctggtggcgttggggttgccggttgaggcagagactggcgggaggaccagatggaatcgcaccacgcgccagttgcccgggatgcatcgggtggaggcagcctgctccggtgccagt

SEQ ID NO: 79 - DNA, 263 bp, Unknown
  Ga0070741_10072506 JGI
tcatgaacccctgtattcaatgcaggagcttgcagtgaggcatcagctcccctgtaagccctcatcatgaccttgaaagagagcctgcgttttcaggaagcgttcacgttcctcccttcgggtgcgcggccatagtgaaacaggtcgaggaggtgaaggcagtactgagaagacagttaccgcctgaaaaccttgtcgaggccaacgttacccgtgcaagcggagtccctttcgagggcagaaagtcaagcatcatgtcaaaa

SEQ ID NO: 80 - DNA, 804 bp, Unknown
  JGI12273J12029_10000967 jgi
gtgcccgtagtaagtcaagacgcaaaaccactaatgcccacaaagccaagcagggcaagaaagggggtgaaagttggtaaagcaatcggcaaatggtcagacttaggagtctactatgtgcaactgctgcaaccatcgggagaagaaacgcagcctattgtggttggagtagaccccggtaaatcttatgctggaatcggagttcaatccgctaaatacaccctactaaggctgcacttaatccttccctttggtcgtgttcgagaaaggatggataaacggcgagagttgaggcgttctcgccggggaagaagaattaaccgcaagctaccacgcaagctacgcaatcaccgacagtgcaggttcgacaatcgtaaacagtctaagattgccccttcaatcagggcatctcggcaactggaactgagagtagttaaggaattatcaaaaatattcccaataatcacgataggttacgagcgagtcagagcgaatgtagacagaaccaagaggaagaaagccaagtcaggtaaaggtttctctccggtgatgtcaggtcaaaactgggctatcgaacaaatgggagctattgcacctgtcttcattcgggaaggatggcaaaaagatggcaacggtacatctcagattagaaagcatctgggattggaaaaggacaagaaaaacaaaggcgaggctaagccagaaactcatgcagtagatggtgttgccttagcagcaggatactttgttcaatacagccgtcacatccgtgtaaatattcagggatatatctggaaaggcaat

SEQ ID NO: 81 - DNA, 232 bp, Unknown
  JGI12273J12029_10000967 JGI
ttcacgaacccctggctagtacgttgagccaggggattgcaggagataaccctgcatgaaatcgtgaatacggctctcgttggcgcgagacaaacacttccgaatgcttccctaattcggatgaaatgtacagaccctggaatcttagggggtggggtaaagcccagaaacaatcgcgccaatgccgtaagggactataaactttagctctaaaggattatctccatcatta

SEQ ID NO: 82 - DNA, 1278 bp, Unknown
  MIS_10001517 JGI
atgaataatgtgtttgttttggatacggggaagaagcccttaagtatgtgtagacctgctagggctagacagttattgaaagaaggcaaggctgctgtatataggaaatatccatttacgataattttgaaggtggcaatgcctgaagctgtggtgaaagaggttattgttaaattagaccccggaagtaaaacaacggggattgctttagtatctgataatcgggtggtgtttgctgctgaattagagcatagggggcaatatattaaaaatagaatagttagacgtgctgcattaaggcgtaatcgcagaagtcgtaagacacgttatcgtgctgcgaggtttaataataggtgccgtaaagctggatggttaccccctagtttacaacaccgtgtattaactacgatgacgtgggttaataaatttagaaagtttgcatcagtatctgaattggcgatagagagggttaaatttgatatgcagaagatggtaaatcctgaaataagtggtattgagtatcagcaaggcacattgcaagggtatgaggttcgagaatatttattagagaagtttaatagaacctgtgtatattgtgatgctaaggatgttccattgcaaattgagcatatacatgctaaatcaaaaggtggctcaaataaaatttctaatttaactttagcctgtgaagcctgtaataagaagaaggataatttagatattaatgtatttttaaagaataagcctgagttattaaaaaatatattgaaaaaggttaaaacacctttgaaggatgctgctgctgtaaatgctactaggaatgccttatttaaagcacttttagatactggattacctgttgaaacaggaactggatcacagaccaagtacaatcgtaccaatctaaaattaccaaaagagcattggatagatgctgcgtgtgtaggtgattctggttctgaggttaaggtggatgctacttttaaacccttaaaaataaagagtatgggtcacggtaatagacaaatgtgtattactaataaacatgggtttcctattaagcacagaactaggaaaaaagtacattttggatttcaaacaggggatatagctagagttgtagtttttaaaggggttaatacgggtatccatgtgggtagggttatctgtaatattaagggtaacttttctgttagaactactgctaggatatatgaaactatctcgtataagaagttcatcttacttcaaaagaatgatggatatagttataattaa

SEQ ID NO: 83 - DNA, 289 bp, Unknown
  MIS_10001517 JGI
ataaagaatactccgttatatacaggggcggcatcagtatatccgtgtcgaaaagttcatttaaaaactttaattagttttaatttacgaccagactaagttttaagtaactacgtacatttaatcataacacctatgaatgctttccagtttgtagctctgttgttaattatcaagatattatggttgaacacataatgaaggtgattagcttagtaagttttatgtacattgtcgaggaaaacataaccaacgaaagttgcgtaggagtattaaaaccatgaataat

SEQ ID NO: 84 - DNA, 765 bp, Unknown
  MIS_1002273 JGI
gctgtctggaaacgttacccgttcaccatcatcctgaaagatgttctaccaaatccccaaattgcacccttgcgattaaaaatagatccaggcgctaaatttactggcttagcactggtagatgatgcaacaggagaagtagcttgggccgccgaactagaacatagaggctttcaaattcgcgatgctttaaccaaacgccgccagttaagaagaggaagacgccatcgaaaaactcggtatcgtcaaccacgctttgataaccggaaacgccctacagggtggctcccacccagtctgcaaagccgagttgagaatatcgtaacttgggttcgtaggttacaaaagctagctttgatttctgatatttctcaggaattagtcaagtttgatactcaactcatggagaatccagacatcagtggattcgcataccaacaaggtgagttagctggttacgaagtgcgagaatttctgcttttcaaattcaatcatacctgtatgtactgtggggctaaagatactcgtttggagattgagcatcttttacccaagtctaaaggtggttcaaatagaattagtaatttaggcattgcttgtaggaattgcaaccaaaaaaaaggccgtcaagctctcagagaatttttagcccaaaaacctgacttgttacagcgcattctgagacaagtaaaacaacagaaagccgacactgctgccgttaattctacccgttgggcattatttaatcgactcaaagagactgga

SEQ ID NO: 85 - DNA, 254 bp, Unknown
  MIS_1002273 JGI
  MISC_FEATURE (216)..(254): Any "n" represents any nucleotide
gctatccgcgaaccactggacaaacctggacaatcccgataaatccttggtagagatagcccggttaagtctaaccacagactacgttaagaaggtcacgacaccctgtgagtgcttgccagctccttgctctgtcgctaccagttaaacatctttatttcgctaaggaagtgctgctagcatgacaagccctcttaacattaccaaggcaaaagnnnnnnnnnnnnnnnnnnnnnnnnnnnnnnnnnnnnnnn

SEQ ID NO: 86 - DNA, 1245 bp, Unknown
  Ga0377217_000700 JGI
atgaccactaaacaattcagtttagttattgattcagagggaaaacagttaagtccaactaatgccaataaggcatggtatttaattaggaaacaaaaagctaaattaattacaagatttccaatggttattcaattgttcaagaagattattcctaaagcaattgataaatcaaaatttatctgtggcattgatatcggcaataaacacacgggcatcgcgattgttcaagaatgccaaactaaatctaaagtaatattaaagggaacaattgagcatcgaaatgatgttaaaaaattaatggaagagcgagcgagttatcgcagatatcgtagaaaaaataagagatatcgccccgaaagatttaacaataggggttcaagcaaaaagaaagggcgcatcgccccatctattagacaaaagaaagagtctattctaagagtaattaataggttaaagagacatgtatctatccataaatatatagtagaagatgttttaatagatataagaaaaattcaagagccaaatatttcttcaacggaataccaaaaatctaataaattagattctaatattcgaatggctgttatgatgcgtgataaatttaaatgccaagaatgtaaaagaggttatgctaaattagaagtccatcatataacgccgaagagattaagtgggaacaatacaattgataatctaataacgctttgtgtcgattgtcataaacaaacacatggaaaagaagaggtatttataaaaaaatattataatattataaaaggaaaaaatattaatttcagggacgcttcgtgcgtaatgcaaggcaaaacatattttagaggtgaattaaataaactagggatagtcgagttaacaactggatgcgaaactttttataaaagacatatgtggaatattattaaatctcattctaacgacgccatagttatttgcaataaagaggtttgtcaagaacaatgcaacataatcgattggattatcaagccattaagaaggcaaagcaaaacagaatataaagaaatatgtggattgacacatcgggattttgtatgttacactactattaagaacgaaatagtgactggatatataaccgcaatgcctattggcaaaaaccaagtaaatattcaatctaagaataaaaaatggactagggtaagagccgaaagatgctttttaattaatcgtcctaatagaataatgtggagaattaatgattaa

SEQ ID NO: 87 - DNA, 268 bp, Unknown
  Ga0377217_000700 JGI
tcgaaatcttattaatatgttatttattcgggttcaagctcaagtgagtgcataatctgaaaggaagttgcacgatgaactacaattttacagaaggctaaaaatacacctacgaatgtaacttcagtttgtagctctgtaagcacaaaggatgaccgacacctacgacatggtgtcaaacaccgaactgcatatgccctgtaatgttatgagcaagaagtaaaacgctcgaaagaaggatggttagaaatgaccactaaacaattca

SEQ ID NO: 88 - DNA, 1395 bp, Unknown
  Ga0180007_10009944 JGI
atggtattcgttatctcagaggatcggaagcctttggatatgtgttccgaggcgcgtgccaggatcctgttagacaaggggagagcggttgtctttagacactttccctttgtaatattgctcaaaaatacctggtcctttgcagccgaaactcacgaatacaggctgaagatcgatcctggcgcgaaatttgctggtcttgccatcctgagagaggataacggacaggttgtatgggcggcggagatacagcatcgcggctggaagataaaaaaggacatggacaggagacggaattgcaggagagggagaaggagcaggaaaacccgacatagagagccgaggtttgataatagaacaagaccgaagggctggctgcctccgtcgctgatgcacaggccgttgaccgtttacacctggctcaagaggctcatgaggtattgcccaatagagcacatatccatcgagtctagcaagtttgatacgcagaagtttgagaaccctgacattgaaggcgttgaatatcagcagggagagcttcagggctatgagctgcgagaatatttgctggagaagtacaacaggctgtgtatctactgcaaaaacccggcgcgtattcccaacgttgagcataatgtacctatgagccggggaggtacggacaggctaaaaaacctggttctgtcatgtgagaaatgcaacatagagaagggaagcaggaccgccgaagaatactttaagttcttacgcaagcgcgaagagaggaaattagagcgggagctgactgagctggaggcatggcggttttcagctaaaggcgcgatccgtcctgagtttatgaaggcaatagccgtgaccaacagcataaggaataaactggctgaactcctgagatcaaccggaatacctctggaagttagctatggatacgtcacgaaaaagaaccgccaggagctgcaacttgagaaggcccattggatcgacgccgcctgtgtgggaacacagaggcagccagataaggaatctattgacaagatcaaaccgttgcaaatagtctgcaagggacgtggaacgcgccggagggtccaggtttacgggccttataaactggatgataatggaaagcctattataccgaaggctaaaaaggatttccctgccgtagctcctgggatgccatgctcaaagcccaaaagcggaaatgagtttttcggcttcaagtctgtcgactacgttaaggccaggactaagcaaggggagaaaacagggagacttctttctgtgaggaaaaccggaagctttacactcagaacaagggataagcaaaaatacagcgtaaattgtaagaattgcagcattatacagcggaatgatggttacgaatatttaaactaa

SEQ ID NO: 89 - DNA, 316 bp, Unknown
  Ga0180007_10009944 JGI
aagaatgttgaaatattttcgcaaatcggatttctgcggaaaaacccgcttgatttgcgcaaatccgtctgcaattgcataattgatggctacagagttgtaaccagcctaagacgctttataacggtctacgttatcggcagagctaaagaacgtaccctgggatgcttgccagtcccaggctctataattcatgagttaaacaggcgatctgagtcgaagccagtgctcgtgagaaaagctgaccgataacattggcgaggcaaacgttacccgcgaaagcggagttcccttacgggaaaaggaaacgcagatg

SEQ ID NO: 90 - DNA, 1401 bp, Unknown
  Ga0233412_10000478 JGI
atgcagaagtttaatttaaagttaaagaacacaccaaaggatgctccacaagtcctttgctctgtaaattcttcattaaacaaagatcaaagtcttagtgtgaagaataaagtactggaattaaacagtcccgatgtggatctacctcaacgtaaagaggagaagaacttgagagtctcttctatggtttacgtattaaataaacgaggagaacctttgatgccttgttctccacagaaagcaaagaaactgattaaggagaatttagcatgtatagttagaagaagtccatttactattcagttaaaatatgcgactggagagaataagcaagaagtaacattaggaatagattctggagctaagaatataggttttagtacagtctcaaaagaaaaagaattaataagtggaactgtcattttagatgacaaaatgaaatctagattagataatagaagaatgtatagaaaacataaaagaagtaaactttggtatagaaaacctagattcaataatagagtttctactaagaaaaaaggttggctaccaccttctattttgagaaaatatcagactcacttaactcttatctataagattaagagattattacctattaaacaagtaatagtagaagtaggtaattttgacatacaaaaaattaagaatccagatattaaagggaaagagtatcaagaaggtgatttattaggatataacaacataaagtcttacatttttgcaagagaaagttataaatgtcaactttgtgacaagtctgtaattggtagaaagactaatttacatcatattatccctaaacctgaaggaactgacaagtctgataatttagccttattgcacaaaaagtgccataaaaaacttcatgaacaaggtttgcaaggtaagttaaaaaagagtagacaatacaaagaagcaacatttatgaatattgttaagaatagatttcaaaaagatttagattgtaaagtagtttttggatatgaaacttttactaaaagaaatgagttagatctgcctaaaaatcatgttaatgatgcttttgtaatttctggtggagagaaacagattaggactatcccttttgaggttgcacaaaaaagaaaaaacaatagatgtttacaaaagaatagaaaaggttttaaaccttctattaggaaacaaaggtactctatcagacctaaagatttagtaaaaatagaaggtaaactttttgtagttaaaggtatatctagttatggaaagtgtattagtctaattaacgaattaggaaaaaccgttaataaatcagttaaaaaaatagattgggtttttcataataaaacgttgatatgggagaagactacagttcatctaaaagaaagtttgcttacataa

SEQ ID NO: 91 - DNA, 273 bp, Unknown
  Ga0233412_10000478 JGI
gtcaattaccccttcttttaggaaggggcttgaaccgtgaggtttaacgtaagagttgattagggagcttagttaagaaagttaattatgcagaagtttaatttaaagttaaagaacacaccaaaggatgctccacaagtcctttgctctgtaaattcttcattaaacaaagatcaaagtcttagtgtgaagaataaagtactggaattaaacagtcccgatgtggatctacctcaacgtaaagaggagaagaacttgagagtctcttctatg

SEQ ID NO: 92 - DNA, 1236 bp, Clostridia sp.
atgaccgaatattgttttgtgttagacaaagacaacaaaaagctttcgcctacaaatgttaataatggatggagattaatcagaaggcaaaaagcagaactggtttccagatatcccatggcaataaagcttaaaaaagtagttaaagatgaagacacagacaaatctgaattttcatgtggtatagatacaggaagtatttatacaggcattgcaatcgttcagaggtgcagcacagggaataagccggttttcaaaggaactttggagcacaggcaagatgtaaaacaaaaaatggaaataagacgtggctacaggagatataaaagaagcaataaacgatacaggaaagcgagatttgacaatagatctgccagtaaaagaatcaacagagcagctcccagcatattacagaaaaaacaggctatcgtcagggtattaaacagccttaataagtatataaatatatcaaaggtcgtaatagaagacgtagccatagatatcagagcattgaccgaaggttgtaaactgtataaatggcagtatcagcagtcaaacagattagatgaaaatataagaaaagctgttattctcagagataagtgcaaatgcatggaatgcagcagatcaaacactaaattagaggtacatcatattgttccaaagcgatcaaacggcaaaaacaacctgggaaatttgataacactctgttctaaatgtcacgatgaaactaaaggcagggaagaacagttcatcaataaatatcaggggatgatagatggcaaaaacataaggtttgattatgcccagcatgttatgcaaggcaagaattggcttagaaaagaattatctaaacaatttcatgtggaatttacttttggttcagatactgcaaacaaaagaatcgactggaatatagaaaagacccacgccaatgatgccatatgcattgcaggccttgaagtcaatgaaagaaagtgcggtattaaggactggacgataaaaacaatcaacaggcgctgcaaatcaaaacttaaagaagaagtatgcggattcaggcacagggattatgcggaatatacagacactaaaggagtaagttatacaggatatgtaacagccatgtaccctgaattaaatgccatcaatattaactctccacaaaaacatttgaaaaaagcaaatgctgaaaaatgtaaattagtgtggaggtttaataagatatattggttttaa

SEQ ID NO: 93 - DNA, 304 bp, Clostridia sp.
tatatagatatgtacaaatatactcacagtcccataataccctgttagtatatgacttaatgtcaggtttcaagcctaagtgaatactgcactgtgaaaacatgctgtatgatgaactacgattgtatgaatgctgaagacttaccttcagatgtgatttgcagtctgaagctctaagagtacaaaggatgaccgacttctaattgggtgaagtcaaacaccgaaatacatgagcaccatactgtcattggcaagcagaaaaatcccacgaaagtgagagtggttagaaatgaccgaatattgt

SEQ ID NO: 94 - DNA, 1554 bp, activated sludge metagenome
gtgcttcctcagccccaagctcttgaatctgtgcctgtagacaaccctggggtagggacgaaacggggcacggacaccgccgtgatggtggtagctggtgtgcaacatggtcgaggggagaccacccgtgagggtggcgtcacgaaccatcagcgggagaccgcaggtggttccggaagccgggttgtcccggcaacaacacagcagcgggtgttcgtacttgaccggcatggtcgtccgttgcagccctgccgtcccgccagggcgcgcaagctacttcgtcaaggccgtgcgcgtgttcatcgcatggtcccgttcgtggtccgcctgattgaccgggaggtggagaccagtgtcgtcgatggggtgacggtcaaggttgatcccggatcacgtactaccggtctggctgttgtggagcagcgggacaccctcaaccccgccaccggcgaaaccaccaccgtgaaggggttgtggttgggcgagctcgtcctgcgcggtctccagatcaagcgcgcgatgcattcgcgtgctgctcttcgcaggggtcgccggtcgcggaacctgcgctaccgccaaccgaggttcaacaatcgcacccgacccgagggatggcttccgccatcactacaacaccgggtggatgtcaccttgtcgtgggttcggcgtttgagtcgctgggctcctgtcatcgctgtcgcctatgagctcgtacggttcgacacccaagcgattgagaaccccgacatctccggtgtcgagtaccagcagggcgctttggctgggtgggaggttcgggagtacctgtatgccaagtgggggtaccgctgcgcgtactgcgatgcccccggggctggtgtgcagatcaacatcgaccacgttgttccccgatcccgcggtggcagcagccgggtgtcgaacctggtaccggcgtgccgcccatgcaatgaactcaaggacactcggctggttgaggacttcctcgcccatgaccccgcacgtctcgcccgcatcactgccgggctgaaacggccgttgcgggacgcggcagcggtcaacaccacccgctgggtgctgtggcggcaactcaccgccctcggataccaggtgaccaccggcacaggcgggcagacccggtggaaccgataccggcaccgcatccccaagagtcacgcgctcgatgcgctgtgcgtcggggccgttgacgcgggggctagctacacggcgggccccaaccagatcatggccaccggcaggggcagctacgcccggacccgcagcaacaagtacgggttcccccggctgcggctcacccgcacaaagcggcactacgggttcgccaccggcgaccttgtacgcgcggtcgttcccgccgggaagaacaccggaacccacatcgggaaaatcgctgtccgagcctcggggtcattcaacatcaccaccacaaccggcgtcgcccaaggaatccaccaccgtcacgtcaccctgatccaacgcggtgacggctacacatacaaaacccaaccgacacccacgaaaggcatgacatgatag

SEQ ID NO: 95 - DNA, 324 bp, activated sludge metagenome
gtcaggcaccccacggctgaagccgggggcttggtgattccaagccgctagcagcagccgagtttgaccagaccgagatacctcgaagggagggatctacgttgtacataagtgagcggaccaaccttggggtgcttcctcagccccaagctcttgaatctgtgcctgtagacaaccctggggtagggacgaaacggggcacggacaccgccgtgatggtggtagctggtgtgcaacatggtcgaggggagaccacccgtgagggtggcgtcacgaaccatcagcgggagaccgcaggtggttccggaagccgggttgtcccgg

SEQ ID NO: 96 - DNA, 1263 bp, Human gut metagenome
atggtatatatccttaataaacataatgagcctctgatgccttgtccagagagaaaagcaagacttctcttgaaacagggaagggctgtcatatacagaaaggacgtgtttaccattaaactgataaatggaagctatggatataaacagcacataacaatgggaattgactgtggaagcaaacatataggaatttctgcaacaaccaataagaaagaactgttctcggcaaatgccgaactaagaaatgacattgttaagctactttctgatagaaagtcattaagaagaaacagaaggtacagaaaggcaagatacaggaaacccaggtttgacaacagaaggattaaagaagggtggctcgcaccatcaatcagacaaaagattgactcacatgtaaggattgtcagtttaatccacaaattgttacctgtgaaacaggttaatgtggaggtggctgcatttgacattcagaagattaaaaatacagacattaaaagctctgaatatcagatgggggaacaacttgattcttataatgtaagggaatatgtattgttcagggacaatcacatttgtcaacattgcaagggaaaaagcaaggatgatgtattgcaggttcatcatattgagagcaggaaaacaggtggcaatgctcctaacaacttggttacactttgcaagacttgtcatgaaaagtaccattcaggtgaaataacattgaatgttaatcgtggaaagtcatttagggatgcgagtgcaatgagtacgatgaggtggctcttgtatgaagaactgaagagtaggttcagcaatgtgaatattacttatggttatattactaagtacaagaggattaagttaggcttgtctaaggagcattacaacgatgcttattgcatagctggtaatcttaatacaagtaggctttgcaatcatcatttaataaggttcatacctaggcatagtaggatattgcatatgcagaaattcagtaaaggcggtgtaagacgaagtgctagtgcttcttattggcttaactgtggtaaaccttcaaaaagcggagcaatgtttaccatgtttgacaaggttaagttcaatggtattgtttgtttcattagtggaagtagtaatggttatgctgcattaagagatataaattggaataaggttcacggttgtaagacaactgtaactgttaataaattagcattagtttctcgaaggcgtggcagcatgttgtttggggaattatgcggatag

SEQ ID NO: 97 - DNA, 271 bp, Human gut metagenome
agacagatgtaagtatttgactatccgcaatcatccccaaagggtaattgatgggtaagcagattagcctaagcacaggtacaacctgtgctacgttagaaatgaatgtataggaacgttgggatgtttatccaagtcccaacctcttcggtcagtgattaaacagaacctaaaggaacggtgttgctgacaactgaaaccatttcataaccttggcgatgggtaacttatgggagaagtcctgggcagctctattttagctgccgtaata

SEQ ID NO: 98 - DNA, 1278 bp, Unknown
  Ga0180007_10001273 JGI
atgcaaaaagtattagtgctggataataacatgaatccattgatgccttgtcatccagcacgagctaggcaattactcaaacaaggtaaagccgctgtctatcgtcattatcctttcattattattctgaagaatagaaaagggggcgatgtacagccagtcgaattgcggatagaccccggcagcaaagtaacggggctggcggttgtagctcaatttggtagaggacgaaccgttgtctgggcagctaatttacaacataagggctggagagtcaagaaggctttagataaacgtcgtattcttagacggagtaggcgatcacgaaagattcgctatcgcccgccacgttggaggaacagaaaaacggaaaaggggtggctgtcaccctctctgatgtcgcgcgtgaataatatacggcattgggccgagaaattaacaacactaataccaataaaaactattgcggttgagactatacgttttgatacacaattgatggaaaaccccgaaattagtggtgtagaatatcaacaaggtgaattgcagggctatgaggtgcgcgagtacttattagaaaagtgggggcgcaagtgtgtttattgtagtgcagacaataaacagcttgagattgaccatgtttggcccaagtctcgtggaggcagtaatagggtgagcaacctcgttatttcttgtgagccttgtaatagagcgaagggtagcagctctgtacaggaattcttggcacatgatccaaaacgacttgagctcatattagcgcagaagcgaaagcccttacgagacgctgctattatcaatgctatttgttatcgtattggtgatgagcttaaagagttgggaatgtcggttacgttttggagcggggggcttactaaatacaatcgttgtaatgctggttatccaaaagatcattggatagatgccgcttgtgtaggaactcatgcagcgcagatactagaaggaatgcttccgctgaatatcaaagcaatgggtagagggaaacgacgggtgtgtcaacctgataagtacggttttcctaaagcgaaacccagaacggtaaaacgggttcacggctttcagacaggcgactttgtgaaagcggttgtgccactaggacggaaagctgaggggacacatgttggtcgagtgacaatacgggcgagtggatatttttgtattagcaagatcgacggcattaactggaaatattgtaaattgttgcagcaaagtgatggctatgagtacactcagatatga

SEQ ID NO: 99 - DNA, 286 bp, Unknown
  Ga0180007_10001273 JGI
ggaagtcgaaatgctcttaagtgagatagctgaagtaacgttatccttcccacgtatgtattggataaccagccttagtaattagtttttcaaaaactaattactacgttacaagcgaatacataggcacttcggaatgcttctccagttccgaactctgcggttgaaagttaaataaactgtacgtgtggaacggttagtgctttcaacattaaaccgcttgctaacattggcgaggagaccataaccgccgaaaggcgagactgaggtaactcagatgcaaaaa

SEQ ID NO: 100 - DNA, 1260 bp, Unknown
  Ga0256407_10000103 JGI
atggtttacgtattagacacagacggtacacctttaatgcctacacagaggcattacagagtaagattcctcctcaaaaagaaggaagcaaccgttgtgtccgtatatccgttcaccattaaacttaccactgacaagccaaggcatacccaaaacgtatcacttggtattgactgtggaaccagacacatcggtgtttctgctacaacggaaaccaaggtactttactcagcagaggcaatactgcgtggggacactactaaactgattgccacaagaaaggagctacgtaaaacacgccggaaccgtttacgttacagacccgaaagattcaataaccgtataacatctaagaaaaagggatggctagcgccttccattcttaacaaagtggcattccatgccaaagtcgttaagtacgtaaggaaacttctaccgataacctcgataattttggaagttgcaccgttcgatattcaaaaacttgctaatcctgatataaaagggacggactatcagcacggggaacaggaggggtcatataatacacgcgagtatgtactgtacagagaccatcacgaatgtcagcactgtcacggtaagtccggtgataaaatactgaatgtacatcacattgaaagcagaaagaccggcggtaatgcaccgaataatctggttacgttatgtcatacatgtcatgatgcatatcataggggcgagatagagcttaacattaaacgcggtaagtccatgcgtgatgcagccggtatgaatctaatcaaagaccgtctgtacgaggttgtaaaagaggaaaacggtgacatcactgttcggtacacgtatgggtatataacgaagtacaaccgtataaagtacggtatagagaaaagtcatacgaacgatgcacaagtgataagtggtaatcttaatgcgaagttatgctgtgatatgtgggagttaaggcaggtacgtagacataacagacagatacacaagttcaatatctgtaaaggcggcaaacttaaacgtaatcagagtgcatactgtgtaaagggttatcgtttatgggacgtggttaagtacaaaagtaacacatatctgataaaggctaaacgaagcagtggttcattccgtctgatgagtttagatggagaggaacgtgacggtgtgggttacaaacatttgagaatagttactatatgtaacagactgattaaaataaaaagtgaaaagagagggtgcaattcatcccacggttaa

SEQ ID NO: 101 - DNA, 317 bp, Unknown
  Ga0256407_10000103 JGI
gtcaataacccacccctaaaaggagtgggcttgataggcgaggcaagcgtgccttactgaaaacaagcccttattgattagccttggtgatagggatttatccccttgaactccgttatccgtgaatgcataggcaccggtggatatacttccaagtctgccgctctgcggtcagtggttaaacagtcctgagaggtagggacagtgctgctgacgaataaaggaaaccacggaataacattggcgatgggagccttacccaacttaggttggagacttacccctaacagggttatttttaaaaaacaaaaacaatg

SEQ ID NO: 102 - DNA, 822 bp, Unknown
  Ga0373630_0001637 JGI
atggtggtgacaatgcgaaacttgactagacggcccggctctgcgagtcgggttagcggcgtggaaagctacaagaacgtacaggtgcaagacctagcctgtacctcttcgctagaaccactaaatggcgtggctgccagaaatggtagcctaagccttccatgcaacgtcgaaggtcactcaactcaaactggggagcccgcaatcgggagagttccagtcgtctccgcagacagtacgtccttgatgccatgtaacccatcgaaagcacgtaagctcctagaacatggcctagcggagaagcgatggagcaagcttggacaactcacgctctattcgggcgtagaaaccgctgtgctacgtgaaaggttcagcctaccaaagaatccagtcaaaagggagcttacatggactacgcatgctgtagacgccatagccatcggctccgctgagatcggatgtgtgaatccgtatccgccagagttctgggtttggaaacgcttcgagtatgctcgacgtcaacttcacaggcttgaacctgacaagggcggagttcgcagaaggtacggtggcatatggagtactccaccattcagaaaaggagacgtcgtgttatggcgtggcaagcttgcgagagttggaggcttcatggatggctacgggatctcactacactctttcgggctgaagaacaaacgtttcacacaagccgccaatccaaacgaatgcgtcaggctattcaatcagcacgtattcagtagacgggagcagccccgattccttccacccatgaatggtgtgggtttccttgggggaccttga

SEQ ID NO: 103 - DNA, 310 bp, Unknown
  Ga0373630_0001637 JGI
gtcgattcgacactcttaaggaagtgttgaaacgacatcgaggaatatgtccagtctcgacacaacgaacctgtccaataggggtgagggagtcggttccacgtgatgaactccgaccggttaaactgtgtttaacaagtcctagaggacacagtgttgacgccgaatacccgagcctccggtagcttcgatggtgaattcggtcaggaacccatgcctaaaggcatgggcttgtgatggtggtgacaatgcgaaacttgactagacggcccggctctgcgagtcgggttagcggcgtggaaagctacaa

SEQ ID NO: 104 - DNA, 1608 bp, Human gut metagenome
atgtacaggcttaccaccgaagcggggatcccgttgatccctgagagactacatgacaccaaaaaaagaaaggagacatcgaggatgtctgaatatatttatgtcataggcatggatggagatccacagatgccgatcaaacgaaagagacatgtcgaaaaaatgttacagacaggaagagcacgcgtcttccggcaagtcccttatacaatacaattaacttataagaatcaaccagtcttacagccagttacgatcgcggaagatcccggacgttctaatatcggaatggcagtggtctctctgagtggagagttactatccgcagcggttgtgcagaccaggaacaaggaaatcgttaaattaatggagaaacgtaagttgcatcgcagagcttccaggaatggagagcgaaaggcaagacaacgactggctaagaggtgtcatacgatgctcaaagctggttttctgatgcgaaaacttccgatgtatagaaaagacaaacgagtgaaatgtcttgtgatccgcaatacggaagcaagattctgtaatcgaaagcgagaagatggatggctgacaccaagtgcggaacatctggtgcggacacacatcaatctgatccataagatgcagaaattcctgccgatcaccgatgttgcgatcgagatcaaccggtttgctttcttatcactggaagatccgagtatcagtggagtcgatttccagaatggcccgttaaaaggctatgatgatctgaatgcagcggtagaagatctacaggacggacactgtttaatgtgtaacagcctgatcgaacaccggcatcatatcgtaccacgaagtatgcagggctccaatacgatcggaaacatcgcaggattatgctgcaaatgtcatgagagagtccataaagatgcaagatttgaggaccgtctgaagaaaaagaaagccggactggacaagcgttatgcagcggtcagtgccttaaatcaggcgatcccgtttatctgcaaacgactggaacaggaattcgggaaagaacatgtccattactgttctggccgagatactgccatggtccgaaggtcctttggataccataagacaaaagaagagcagctacatgtggtcgatgcctggtgtatcgcagttctttctttacggcagatcccagagaaagctccagagttcgatcatgtgcatgagatcctgcaatttcgcagacaggatcgcagccggatcaaagctcagacctctcgtgcatactatcatgaaggaaagaaaattgtcaggaatcgcaaaaaagcggaagggcaaggagaagattcccttcaggaatggagaaaacgacaggttgatagatatggagaagagcagaccagaaagatgatcagtcagttaaaagtcaagaaaagtatccggcgttacaatcgtctggaccgtctcatgccaggagctgtcttttattatcaagacgttcgatatgtcatgcgtggacaacattgcgaagggacatatcttcaggcggttggaatgggaagcaaggattttcctgcaaagaaatgcaagatcgttgctaacaatgagggactggtctttgtgtcataa

SEQ ID NO: 105 - DNA, 272 bp, Human gut metagenome
gtcaattaactcatgactaaagtcacgagcttgcagaaagttttatgaattagttagcgcgttaatgagcagaaacaagatgtcagcgatcttctttggaaagtgggcactctgggattctctagtcccagaccctgtcaagctgacaccaagtttaagaagaccaaaatcttgtcatgtacaggcttaccaccgaagcggggatcccgttgatccctgagagactacatgacaccaaaaaaagaaaggagacatcgaggatgtctgaatat

SEQ ID NO: 106 - DNA, 735 bp, Human gut metagenome
atggtgtacgtacaagacataaatggtaaacctatgatgcctacaacaaggcatggtaaggtaagacgactgcttaaagaaaacaaggcagttgttgtgaacctatgtccgtttaccatcaaattaacgtacgtcacatctgattacaaacaagaaattgtgttaggcgttgatgctgggaccaaacacgttggtctatcagctacaacgaaaagcaaagaactttacagcagtgaagtaattcttagaaatgatatcgtagatcttttgtctaccagaagagagctacgaaaaacaagacggaatagattgagacatagaaaacatcgttttaacaatagaataaaaagtaggcgtcccggatgggtagcaccttcggtgaagtacaaaatagacgcccatattcgtgttattgataatgttttttctatactgtctgtatcccgtattgttattgaagtagctcaattcgatactcaaaagattaacaatcctaatatatcaggtaaagaatatcaggagggtgatcaacttggattttggaacgttagggaatatgttttagcaagagatggacataaatgccagcattgcaagggaaagtcaaaagacccagtattgaatgttcatcatattgaatcacgaaagacaggtggagattccccatctaatcttattaccttatgtgaaacttgtcataaagaataccataaaggtaatatagatttaaaaatc

SEQ ID NO: 107 - DNA, 269 bp, Human gut metagenome
ataaccaatttgtattgtattatgcataatagccaaaagctattccgattattagcctaagtgttgaaacaaacactacgttatttaagaatagatagttacctacggatatttacccaagtctgtagctctaaggtaggtgattaaacagttctggtattcaggaacagtgttgcttacgaaaaaccttaaataacattggcgatgggtactaacagagttttactctgacttatgttgaataaacattaaaaacgtttgtagatatg

SEQ ID NO: 108 - DNA, 1029 bp, Unknown
  Ga0315279_10002905  JGI
atggttccagtatttgattcaaaaaacaaaccgttaatgccctgcacagagaagcgtgcacggaaattactggagaaaaagcaagccttctgtttctggaagaagggaatcttttgtattaagttgttgcgagaaccttctgatagacagtatcaggatgttgttgtaggtattgatgttggatcgaaaagagaggcttataccgttactactgtcaaacatgtagtattgaatattctcacgaatacacctgattgggtaaaagacgcagtaaaaagtcgtagagaaatgcgtagaggtcgcagatttcgtaagacaccatgtaggcaaaatagaactaaccgtgctattatggagctttcgcttggtatgttagcaccttcgacaaaggcacgatggcaaacgaaattaaggattctaaattggctatcaacattgtatccgataactgatgtcgttgtagaagatgtgaaagccaaaactcgtaaaactggagcttacgctggttcaaagaaatggaatatgtcattttcaccattggaagtggggaaaacttggttgtactcggagataaagaagttctggaatttgtatttggttcagggatacgaaacaaaagaatggcgtgatatggcaaagtataaaaagagtagcaataaactaaaggactgttgggaatctcacaatgtagattctcatgttctttgtgagatcggtcttggaggttgtatcaagccattcaagaagatacttagactagagtttctacaccttcatagaaggcagttgcatgttctacaatttgccaaaggtggtattcgtaaattgtatggtggaacgagaagcatgggatttaagcgtggcagttgggtaaaccatatcaagcatggtttgtgctatatcggtggcacatcaaaagaaagagttagtctccacgagatgtcaacaggcaaacgtttgacgcaaactgcaaagccagaggattgtagattcttgacttatgcaacgtggagaatgtcatttatttga

SEQ ID NO: 109 - DNA, 209 bp, Unknown
  Ga0315279_10002905 JGI
gtcaataaccccacgcataaatgcgggggcttgagtaatctggaagccaaccagaccaatcgagacgaaactgttgactagactatgttttagaaaccaattgagctatctgatcgtggcaggtcaaaagatgtcatagacgccaccctaatctataaccaatctgatagccaatgtcgaagggtcgtttaacaaggagtgtaaactca

SEQ ID NO: 110 - DNA, 1257 bp, Unknown
  Ga0194137_10007470 JGI
atgaaagtatatgtattaaataaacatagtaagccattgatgccttgttctccaagaaaggcacgattattattacgtgataagaaagctaaagtagtcaaaaaatacccatttactatacaattactatatggatcaagtggatatcggcaacaaatcactttgggtatcgatgcgggcagcaaaactatcggtttatcagcaacaaccgaaaaccatgaactatattcggcagaagtcatattgcgcaatgatatcagtgataacatcactaccaaaaagcaactaagaagaacacgtagaaatcgtttgcgctataggaaaccaaggtttttaaatcgagtgagtaataaaaagaaaggttggctacctccatcaacacaacacaaaattgatacgcataaatttatggttgaacaagtacataaattgttgccaattagtaagattatagtagaaacagcagcttttgatattcaaaagattgataatccaaatattagtggaagccaatatcaacaaggaaaccaacatggattctggaacacacgggagtatgttctttatcgtgatggtcatacatgtcagatgtgtaaggggaaatccaaagataagatactgaatgtgcatcatattgtatatcgtagccatggcggtactgataaacctaataatttgattacattatgtaatacctgtcatagtcctaaaaaccataagaaaggtgcaatattatggcaatggatggaaaatggaaaaaaggtaattacttcatataaagatgctacgtttatgtctataatgcgttggtcattttataattggttgaaagataagtatatagatgtatcaatgacttatgggtataccactaaaaataaaagaattagtaatcaattaccgaaagagcattatattgatgcgtattgtattacaggcaatattaatgctaagagattagatggtcattggatatataagaaaatgcgtaagcataatagatcattgtatatgctaaatccactgaaaggtggtatatggaaaaagagacaagctaattattatgttaagggctttgctttatttgataaagtacgttatgataatgttgtatgttttattatgggacgtagggctactggatatttcaaattaaggactattatgggaaatgaagtacataatagtgcgagttataagaagattgagtatgtaggacgtagtggtgggtatatgtatgattatgtggtacattag

SEQ ID NO: 111 - DNA, 283 bp, Unknown
  Ga0194137_10007470 JGI
gtcaactaccactgggctaataacccagtggcttgataatatatcaagccacagttgattagactaaggtattaatttacctacgttgatccggtcatgatacctatggatgtacaatatagcctagtccatagctctatcgtatattattaaacgatttcaaagtggttaatggaatcagtgtaatatatgtaaaaaagccatttcaacattgtcgaaggctaattacttacttcggtaagaagggcttatctattagcccaattaagaggaaattatgaaa

SEQ ID NO: 112 - DNA, 1032 bp, Unknown
  Ga0310696_10080563 JGI
atgctggtatatgtccaagacaaggaaggaaaggcgataagccccaccaagaggtgcggacgcgtcggctatctccgccgtcacggacttgccgtggtcatcatgctcgagccgttcacaataaaaacgcccgaggaagatgccgaatctttagttcggcataggaatcgggcgggggttgacacatcctctggaaaaatggtatactatgaaccgaaagaacccgtcccagaagttgcaaaggcactctgcgaagagaaaacggctcaaaatgcaacgggacatgacacccgccatcgtcttgaaaggactttggcggcagggcttggtcaacggcccaatcgtcggggcgaaagcctacggcaagcattcgcgtcttcagcgcggaagcagttgacgatacggctcctgtacgatgtccacgggaccgagcatgtccaggcggcgacgcttggtgtcgacacgggggcgaagcacatcgggctctcggcgtcgaccaagaaaagcgaactctattcctcacaggtggaattgagggacgatgtgtcgagactcctgacagcccgcagggagaatcggagaggacggcgggggcgcaggcacaactggtaccgccccgcgaggtggcagaaccgcgctgatgcgcgggaagagcacttgccaccaagcatagtgcatcgggcggagtcccatgttcgcgcaatcaagaacgcggcgaagatacttccactgcggaagatagtggttgagattgggaagttcgatgtgcagaagataaagaaccccgacatcgagggcgtcgagtaccagcgcggtcctcagatggggtggaagaacctaaaggcatacgcccgctggcgcgatggcgagaagtgccgcatctgcgggaagtcgtcgttcaaggacaaggcgaagctggatgtccaccacatcatccagcgtgcatatggcgggacggatgtccccgagaatgtcgtgaccttgtgcgagaactgccaccacgcccaccacgccaatctgcgcaggataaag

SEQ ID NO: 113 - DNA, 299 bp, Unknown
  Ga0310696_10080563 JGI
gtcagcggcccaaccctgaagggttgggcttgtgggtgaaagagaccgcgagcccgagctgactaggcgactgaaacgaaaggagaaaaactgagtgacagtagaagttgatagagaatgcataggcaccgtgggatggtcgtccaagtcccacgctctgcggtgtgcggttaaacagtcctgcgaggtaggggcagtgccgtacacgggaaacctctttcaacgcgccgatgggcaccacacccgccttcgggcggagactaaccccgcaaggggataatataggaaacaccatgctg

SEQ ID NO: 114 - DNA, 1395 bp, Human gut metagenome
atgtatgtattcgttatagggctggatggaacaagacttatgccttgtaaaccaagaaaagcccgaaaattaatagaagctcacaaggctgaaatctataagaaacagccgtttacaataagattactgtataagacaggctgtgcttcacaacccataacattaggtatagatacaggttcccagcatatcggaattgcggtaacatcagaaaacaaagtcttataccaggcagagatagaactgcgcagcactatggataagcgttcactcatggaaaccagatacagttaccgcagaagcagaagataccgcaagaccaggtacagaagtcctaaattcagatttcatacaaaacggacatattctgaaacacttgttaagcgtaagaccacaggtattatgacccactgggttaaacatattaactcaatgagtacaaacagaccggacggatggcttgcaccatccatgcagtcgaaagtagatcatcatatccgatggattaacagatttttagatgtgcttccaccagatacgaaactccggctggaaattgccaggtttgacatggcaaggatgaaaaatccggaagtgcataatgaattataccagcatggtccacagtatgattacgaaaatttaaaagcttatgtatttgacagagatcattataagtgtgtggtctgtaaaaggaaattagggagtaaacagccggatggacattctttaaaaggaatgatgcatcacataacattccggtccaaaggagctacggacaatcctgatcagcttgttacagtctgcgaatactgtcatactccccaggcgcataaagaaggtggagtactctgggatctgaaagagaaacacaaatcagtgcagcggggactaagggatgccacgcagatgaacataatccgtacacgactggttaaagcatttccagatgcggagctgacttatggaaatattacggctgctgatagaaagaagatgcatcttccaaagtcacatgctggtgatgcagttgcaatagcaatgaaaggtgaggatgttaatatctgtgaaccgactgtatatataaaacagattcggaagaaaaagcgttcactccatgaagcaacgcctagaaaagggcgtaaaaggcctaatacccaggcagtaagaaatcctaagaatacaaaaagcataggtatttatcatatttatgacactgtaagattccagaatgaaacaggatttatctcaggattcacaggcaagtctgcatatgtccaggattttgacggcaattatatcacaatgcctggaaaatcgtataaacagataaatttatcgagtttagaactggtaaagcataacaacaactggattcaaaagaccagaaattaa

SEQ ID NO: 115 - DNA, 224 bp, Human gut metagenome
ttgaataaccgagcatggttaaataattgtcgcccgtaaggacaggatgactagcctaagttccaagagaactacatcagaagtatgatcccagttccagacggtaccctaatctgagcgctgggcgggcaacatatgaatccaggagaaaggatgatgtaacccggtgttacaagtactctgatattggcgaagggtaaatgctgactttggccagcatagac

SEQ ID NO: 116 - DNA, 1503 bp, Unknown
  Ga0307373_10037003 JGI
gtggtcttcgtcttggatcggcgcaagaagccgctgatgccttgcagtgagcggcgggcgcgcatcctgctgcagcgcggccgggcggtcgtccaccgcctgcggccgttcaccatccggctccgggaccgcacggccggggagtcggtgcttcaacccctgcgcctgaaggtggcgcccgccacgaaggtgacggggggcgctctggtccgcgacgacggtcccgatgctggcgccgttgtcttcgcggcggagatcaagcacaagcccggcatccacgccaagatgctgcgccgggcgggctaccggcggcgccgccggtcagccaacctgcgctaccgggccccgcgctttgacaaccggcgccctgagccgtgcatcgtttgcggcggcaacgcccggcacgggcacaaccgctgccgccgatgcgtcgaggccggggacgaacccgcaggcctcggggcgcgccccccgcgcctggcgccgaccctgcggagccgggcggacaacacccgctcctgggtcgcccggctgcgccgctgggccccggtgacggcggcatcggtgctgttggggcgctacgacacgcaggctctgcaggaccccgaggtccggggggtcgagtaccagcaggggaccctgcaggggtacgaagtgcgcgagtacctgctggagaagttcgggcaccgctgcgtttactgcggcggcctttccggcgaccctgtgctcaacatcgaccatgtggtgccgcgcagccgcgagggcaccgatcgcgtctccaacctggcgctggcgtgccgggcgtgcaacgaggcgaaggacgaccggccacccgaggagtgggcggcgcgcctggcacgcctgcattccccgctggcggtcgcgcggatggcgggatgcaaggccgtcgcgggccggctgcaggcgccgctgcgcggcccggcggccgtcaacgccactcgctgggccgtctggcgtgtgctggcgcagacggggctgcccctggaagcggggaccgctgcccgcaccaagtggaatcgcgcacgcctcggggagccgcggagcccggccgccgacgcggcctgcgtgggcgcctcgacgccagccgcactgcggtgggcgggacggtgggtacacgccatcacggcgctcggccgggggcgctatcagcggacgaacacggatgcccacgggtttccgcgcggctacctgatgcgcggcaagagcgtgcatggcctgcggagcggcgacctggtgacggcgggggtgcggcatcgggccgggggccggctgccggcggcgtttgtggcagagatcgaagccacaggccccgtcgcggtgcgcgccagcgggtccttccgcctcgggccgttcgaccccgtgcgttggcaggcctcccgtctgctgcagcgcggggatgggtacgcctaccacgtggccccgctcggcgacaccggcgcccggcggggcggcggggtggaactggaggaggcggctccgtga

SEQ ID NO: 117 - DNA, 297 bp, Unknown
  Ga0307373_10037003 JGI
gcccgttgacccccgggatgcttaccaggccgagcgcccgaggttggcagccgttgagggcgctacgttgccgccaggcccaagacccaccccgggatgcttcctcagtcccgggctctggaaccggccgcagcagacaagccccgtgggcgggggcacgaaacgggcggtcggacgcgccgggcggtgacatggccgaggggagcggatcgggcaagccggcccggtcccgtcacacaggccccgtaaggggcaccccgcaaggggcctgatcgcgaggaagggggcgcgcccgtg

SEQ ID NO: 118 - DNA, 651 bp, Unknown
  Ga0373633_0030533 JGI
atggttttgagcgtgtttgtattggacaaccgaggtgtggcagtgatgccgtgtacacagaagcgtgcaaggctgttgcttgcgcgtggacgtgcccgcgtgcatcggctggtgccttttgtcatccgatcggtcgatgtcaaagcacaggattgcagcttgcagcccttgtctttgaagatcgacccaggcagcaaaaccatgtgccaaagacccatgcgctggatgcggcgtgtgtcggtgagatggactgggtatcggcccagcctgcacatcaaatccacagggcgtggcagctaccagcgcacacgcctggatgcgtttgggttcccgcgcggctacctgatgcgaaataaatcggtcaagggttttgccacaggtgatctggtcaaggccacggtgacacacggcaaaaagcaaggcggctaccgagggcgtgtggcaatcagggccacaggcagtttcaacatccaaacccgagagggtgtggttcaaggcgtctctcacaggcattgcacgttgttgcaacgcggtgatggatatggttaccaacagcagagcaaatcagacgcaggaagagatcgtgcttcgcacgatgcgctctgcctccccggcatgaatgccggggtctcccgcgcaattcaagggtga

SEQ ID NO: 119 - DNA, 312 bp, Unknown
  Ga0373633_0030533 JGI
gtcaactaccccggactaaaggccgaggcttgatcagagatgtttaagcctggttgaccagaccaagaaaggagtcattttttctacgttgttgttaaggcgaaaagtccgacccacgaatgcttcctcagttcgtggctctcgaaggcggtggtgcagacaagcaaatgggtacgcacgaaacggccccgtcattcccacgccggacagcaacatggacgaggggagatgcaccgaaaggtgcgcgtcacaaggcccttacgggctggctgctggaaagacagcacttattttggagagatggttttgagc

SEQ ID NO: 120 - DNA, 1329 bp, Ktedonobacter sp.
atgtcaaaagtgttgctcctggatatgaccaaacagcccttagacccagtgcatccgggccgagcacgcctgttgctcaaagagggcaaggccgccgtgtatcgcaggtacccctttaccctcatcctgaagacgcaagtggactcccctgcggtgtctgccctgcggctcaaacttgatccaggggcgaagacgagcgggctggccctggtcgatgacgcgagcggggaagtggtgtgggcggcagaactcggccatcggggagccagcatcaagaagcgcatagatgcccggcgtggcgtgcggcgcaagagacgctcccgtttcacgcggtaccgcaagccgcgcttccacaaccgcaggagttccaggagaaaagggcggcttccgccctcgctggaaagccgggttgccaacatgctgacctgggtagggcgcctgaggcgtttgtgccccattgaggtgatcagcatggaactggttaagttcgatatgcaggccatgcaaaacccggagatcactggcgcccagtaccaacaaggggaacgcatgggctatgagacgcgggaatacctgctcgcaaagtgggggcggcgatgcgcctactgcggggctgaggatgttcccctggagattgagcacatcctctgccgcgcacgaggcggcacgcatcgcgtgagcaacctcaccctggcctgcgagccgtgtaacgtcaagaagggcacgcaactcatcgaggatttcctgaacaagaaaccagacgtgttggcacgcatcctggcccaggcgaaaacgccgctcaaagctgctgccgccgtcaatgcgacccgctggcacctctttgaacggctgaaggcgaccggcttacccctggagaccagcagtggcggtttgaccaaatacaaccgggcgaagcggcatctgccgaaaacgcattggctcgatgcagcgtgtgtcggccagagcaccccaaagcctctggaaacgagccaggtggttcctttgctgatcgaagccaccggtcatggcaaccggcaaatgtgcggcgtcgatgagcatggctttcccatccgccataggcagcggaagaaggtgcatttcggctaccagacgggcgacctggtgcgggcggtggttcccacgggggcgagggcggggacgcatgttgggcgcgtgctggcacgagccagcggctctttcgatttgaggaccaaagctggacgccaggccgggatcagttatcggtattgccgtcccatccatcgcaacgatggctatcgttaccagcaaggagggcggcatgcagtccccgccacccaatccacctga

SEQ ID NO: 121 - DNA, 290 bp, Ktedonobacter sp.
gtcatgaacccctgcatcgaatgcgggggcttgcagcaaggctcatcgtctcgctacaagcccggaacatgaccagactcaggcttgaaacagagcctacgttaggagcgaatccataggcacgtccgggtgcgacgccagcccggaccgctgcggcaatcgattaaacagggctagcgggttaccccagtgtcgtttgcgtcaaaccgctccataaccttgtcgaggcgaacatcacccggcgcttgccggaggctcgcaagagcaaagaggaccccatcatgtcaaaa

SEQ ID NO: 122 - DNA, 1317 bp, Unknown
  Ga0209048_10010134 JGI
atgtcacaggtctttgtcctagatgcaaacgaacaggcattgaacccgatccatccgggacgcgcccgcttgctgctcaagcaaggcaaggcagccgtccatcgacgctacccgttcacgatcattctgaagagggtggtagagcagcccacactccatccattgcgcgtcaaaatcgatccggggagccacaccactggcatcgctctcgtcaatgaacacacgggagaagtggtgtgggcggctgaactgacccatcggggtgagcagatcaagcgcgatttggacaagcgtcgagcagtcagaagaagcagaagacagcgcaagaccagatataggaagccacgctttgctaatcggcgcaaacgcacagggacgttgcctccctctttagagagccgcgtatgcaacgtgctcacgtgggtacggcgcctgatgcagatctgccctgtcaccgccatcagccaggaactggcgcgctttgatacccaggccttggagcaccccgatatcgagggcgtagactatcagcgcggacagctagcaggctatgaggtcagagagtatgtcctgctcaagtggaaccatcagtgcgcttactgtgatgcgcgcgaggtcccgctggaactcgatcatgtgcagcctcgcagcaagcgctgccttgatagagtgagcaacttgacgctgtcctgtcgatcctgtaaccagcgcaagggcaatcgggatgtgcgcgagttcctgcatgacgatcctgctcgccttgcccgcatcctggcacacctaaaaagtccgctgcgggatgcagcagctgtcaacactacccgctgggcactcaacgcgcggctcaagttatttggggttccggtcgagagtggcagcggcggcttgaccaagtataaccgcgtgatgcgggggctcgacaagacccactggctcgatgcggccaacgtaggcaggagcacgccagcctcgctcatcatcaaaggcatcgttcctttgcacatcattgcaaccgggcacggcagccgccaaatgtgtcgcatggacaagtacgggttccctcgtaccggacccaagcagcgcaagcgtgtccaggggttccagacgggtgatctcgtgcgcgctgtggtgacaagtggcacgaagcagggaacctacgtgggcaaagtggctgtgcgtactcgtggcgtcttcaacatcaccactgcgcagggtgtggtcaccgacattcatcatcgctactgtacgctcatcgctagagccgatggctatacctatcggcggcccaaggaggtggcactctctcccatcgcctga

SEQ ID NO: 123 - DNA, 307 bp, Unknown
  Ga0209048_10010134 JGI
gtcaggaacccgccctgtagaacggggcaggcttgcttgcaggagcaagcctcatcttgaccagtctcagccaccggtcttcttcttcattggaagagggccgacggggcttcgttcggagcgaatggataggcacgtccgagtgcttcaccagcccggacctctgcagagtagcattaatcaggttgacgaggtaaagccggtgtgctgctcaaatgaaaccgctcaagaacactgacgaggtgaacatcacccgcgcaagcggaggctcgtaagagcacaaccaaaggaatccagcatgtcacag

SEQ ID NO: 124 - DNA, 1356 bp, Human gut metagenome
atgttcgttgcagtcattagcaagactggcgtgagactcatgccaacaagtgaataccgggctcgtaagctgctgaactccggaaaagcaatcatctatggataccgtccgtttacgatccagttaacagaaagggaaactggcgctcttcagccagtagaactctgtgtggataccggatatatccatattggagtatctgtaaagtcagagaagcacgaatatctggaattacaggtcgatacattaaccaacgagaagaaaaagcatgatgaacgccggatgtaccgtaagcagagacgaaaccggaagcgataccggaagccgcggtttgataaccggaaacgggaatctggctggcttgccccgtcactgagacataagaaagaggttcatctgcaagtcataacaaagatatgcgatgtatatccaattgcagacatcactctggaaatgggaaactttgatacacaggttctgaaagctcaggaaaaaggtaagccgataccgcaaggaaccgattaccagcatggggaacggtatgggattgcaacactccgggaagccgtctttacaagagatgagtataaatgccagtgctgcgatcgaggaatcaaagatggcgcaatcctgcatgcccaccatatccagtatcggagccatggcggaaccaaccggatgtccaatctgatcacggtatgtgagaaatgccatacaccagccaatcataaaccgggtggaaaactgtacggttggaaaccaaaggctgcctcgttcaagggcgcaacttacatgacgattgtccggtggcagttatacaacaaagtgaaagaagcactgccagtgattggtgtcaagattacctatggcgcagaaactaaggaacgccgcaggagcatggatgtcaaaaagtcccatgtgaacgatgcattcgtaataggacggttccatccaaagcaccgttcatcaccggtactttataaaaagaaacgccggaataaccggtgtctggagaacttctatgatgcgaaatacatcgacagcaggaacggaaagaaacgatccggccaggaactgtttagtggcaggatcagccggaaccataagaaggattccgagaacctgcatcgataccggaagaaaaaggtgtcacggggtaagcggactattcgcatacagcgttacaagatccagcctcatgatatcgtcctatttgacggaaagaaatatgagaccaccggatgccataacaaggggaccagggcaatcctgctaccggagaagaaatcgaaatccgtggataaacttacaatttataaatatgcaggtggatattatccatcgaagtttgcttag

SEQ ID NO: 125 - DNA, 420 bp, Human gut metagenome
gtcaacaaccccgtctgaaataaatttcaggcggagcttataaaagatctgatttttattagatcttagccccgtcttagatttattgatggcgacgaccgaaaggccgtaaatgattagcctcagtgcaacgaaactggtcagaccagacacggtgaattattagcactacgttaccggtaaaattaggcactccgggatacacctctagtcccggaccctgcggtatcttattaaacatctctgagggtaagagaagtgtgagatacgcgaaactaccggataactttggcgaagaggaccaccgattctgagtaggtacttgtaccgaaaggatagagaacctgtatggggtatccataaggatatctgatacagaaggcgtaagccagattttaggaaggaggacagctgatgttc

SEQ ID NO: 126 - DNA, 1329 bp, Proteobacteria bacterium
atgagccatgtctttgtcctggaccgtgcccgtacccctctggacccctgccacccggcgcgggcacgggagttgttgcagcatggccgtgccgcggtgttccggcgtttccccttcaccatcatcctgcgcgaccgcaagcgagccgagtcggtggtacacgaccaccgcttaaagattgacccaggcagtaagaccagcgggttggccctcgtgcaagaccagcgcgtcgtctgggctgctgagctgacccaccgagggcagcggatcagagacgccctggagagtcgccggggccttcggcgtagtcgccggcaacgccagacgcgctaccggcaaccacgttttctcaaccgcacacgtccatccgggtggctcccgccgtcgctggggagccggatagcccatacgatgacctgggtagagcgtctggcgcggtcgtgtcccatcaccgccctgagccaggagctggtgcgcttcgatacccagatgatgcaagaccctgagatggctggggtggcgtatcagcagggcgagctggctgggtatgaggtccgcgagtatctgctggagaagtggaagcgcacctgtgcctactgccacaagacgggcgtgcccttgcaagtcgaacatctcatccccaaagcgcgaggtggctcggaccgcgtgtcgaatttgacgctcgcctgtggcccatgcaatcaacagaaaggcacacagacggcagcagagttcgggttcccagcgatccaggctcaggccaaacagccgctgaaagacgccgcggccggcaacgcgacacgttgggggctctatcgtgcattagcaacgacggggctccccgtcgaaacaggcaccgggggacgcaccaagtacaaccgcacccgcctgaacatcccaaagtcccactggggtgacgcggcgtgcgtcggtgccagcacgccagaggcgttgcgtgtcgcggggatccagccgctgggcatccgtgctatggggcatgggacgcggcagatgtgtcgcaccgaggcccatggctttcccaaggcgcaccgcacacgccagaagaaatatggcggcatgcagaccggcgatctcgtccaggcggtggtccccaaaggcaagtatgccggcacctgggtcagccgtgtggtcgtcagggccagcgggtggtttgacctggtcatccacggcaagaaggccagcgtgcaccacaaacattgcacgcggctgtgggctgccgatggctatacgtacaccctgcctgctggtgcaggcaccgctgtgtcctccccccactcaagcgaggggtctccacagcggaatctttag

SEQ ID NO: 127 - DNA, 265 bp, Proteobacteria bacterium
atcagagtcgacgtactcccccgactgaagtcgggggactcttaggaaactgagagtcggtgtcgagcagactccgtgccgcaaggcacgccgttcttttggtcatgacaccctggaatgcgtggctagttccaggccctgtcgtctgtcgttaaatgtccgtggcgcgtaccacgctgtgcggcagacaggacaagccatgagaacattgtcgaggccaacgtgaccggcgcaagccgagcggaaaggtaacttcatgagccat

SEQ ID NO: 128 - DNA, 1407 bp, Unknown
  Ga0256831_1000378 JGI
atgtctaatcgtgtatttgtattagatacaaatcgtaaaccattagctccgtgccatccggctagagctagggaactattaaggaaaggtaaagctaaggtatttagaaaatacccttttaccattattttaaataaagcttatccaaatgctaaactaacatacattaccataaaagtagatccgggtagtaagcagacaggaatggcattaattgctaaaggacagaataaaacccgttgtatttttggtttaaatatagttcatagaggacaacagattgttgatgctttactcagtagaagacaatctagaaggactagaagatccagaaaaaccagatatagaaaacctaggtttgataacagagctattcctaagggatggttacccccttcaatcttatctagactatcgaatattaaaacctggatactgcgttttagtaaacttactactatagctaacgctgtagtggaattagtaaaatttgatatgcaaagaataagaaatcctgatataaaaggtaaggaatatcagaatggtttattaaaagatttagagttaaaggaatatctcttatacgcatataaccatacttgccaatattgccatggagtatccaatgattctattcttgagaaggaacatatacaccctaagtctaaaggaggatctgattctgttgacaatctcaccatagcctgtaggacttgtaatattgcgaaatctaatctgctattgaatgattggttaaggattgtgtctgataagaaagataagctatctgtagctagaactaaatatatccctaaagttataaaaggaattaaaccgagtttaaaagatgctacggttagcaatattctttctaatcgtaccatagctttctgtgaatctatgggtttaaatacagaggctgcgccttcttatctcactaaatataatcgtaagaatcatggttacaggaaagaccattggatagatgcgactatgtgtggtaatctagacagaaaaatagagatatataagtctatgcgttgtataacagccattgctcagaaaactaataatagacaaatgtgtctaatggataaatatggttttcctaggactaaggctaaagggcaatctactgtatatgggtttaaaacaggagatattgttagggctgtggtgcctagtggtaagtataagggaaaacatatagggaaagttatggttaggaatagtggatggtttgatgttaaaaccattaaaggtaaaattatcactaattattcttattgtaaaaccacgcataagaaagaaagttttacctatcaacacggtactaaaactattctaaaaataatatccaatagaagggattgtattaaagatatttttaatactgtaaaatctcaa

SEQ ID NO: 129 - DNA, 330 bp, Unknown
  Ga0256831_1000378 JGI
gtcaacaacctcgtcctaaagaacgaggcttgtattaatttataagtctctattaattagggtgagccctaagaaggctatgttgaccagactctgtgttatgtaaataacactctgttaccaaagaatatataggtacccgtaggtggctttccagcccacggctctacgctagcctgttaaacaatgctgaggaaaggcatagtgcagtctagatataaaacctttggataacattgtcgaggaaaacgttatggtttgggtcggtatgtgccagactagattttaaatggaaacatttatattaaggagactgtaatgtctaatcgt

SEQ ID NO: 130 - DNA, 1260 bp, Unknown
  Ga0315550_1018591 JGI
atgcagcgagtattcgtgctgagcagcgaccgcgagccgctagacccgtgccacccggcacgggcgcgcaagctgctcaaacaggggcgggcagcggtccttcggaagtggccgtttacgataatcttgaaggatcgcacggtggccgagtcggtcacacacccgcaccgggtcaagatcgatccgggcagcaatacgacgggcctgggagttgtgcaggagcaaacaggcgaggtcgtctgggcagcggaactggagcaccggggccagcagatcaagcaccgaatgacgagccgccgccagttgcggcgggcgcggcgtggcaggaagtgccgttaccgcaagccgcgcttcgacaatcgggcgtcgagtcgtcgcaagggcaggcttccgcccagcttgcagagccgtgtcgagaacgtgagcacctgggtcgaacggctgaggcgctactgcccggtcgaggcgctgtcacttgagctggctaagttcgacacgcagagaatggagaaccccgaaatcagcggcgtcgaataccagcagggtgaactggcaggctacgaggtgcgcgagtacctgctggagaaatggggccgcaagtgcgcctactgcggtgcggagaacgtgccattgcaaatcgagcatatcgtacccaaggcccgaggagggtctgatcgggtgagcaacctggcgatctcgtgcgggccgtgcaaccaggagaagggaagctgcacggcggaggagtttggacaccccgaggttcaggcgcaggctcgcaagccgctgaaggatgcggcggtactgaacgcgacacgctgggtgctgtttcgcagacttcaggcgatcggcctgccgctagagatcggcacgggcgggcggaccaagtacaaccgcacgcagctgggacttcccaaggcgcattggactgacgcggtgtgtgttggggagttgggtgagcaagtgcgcgttccgcccggcctggtaccgctgcagatccgggcgaccggccacggaagacgacagcggtgcgggacggacaagtacggcttcccgatccggcacgcgcctggcgcgaaaaagtttcggggttggcagacgggcgacatcgccaaggcggtgatccccaaagggaagtatgcaggcgtgcatgttgggcgtgtcgccattcggcataggctatcgttcaggctgaatgggatcgacgtgcatcccaagtatctggagctcgtgcagagggcagacgggtatgcatactcctag

SEQ ID NO: 131 - DNA, 300 bp, Unknown
  Ga0315550_1018591 JGI
gtcaactaccccacggatgaatccgggggcttgtgcggaagcattgcgagcccggagttgaccagtcccagccaccagccgagaggctgatggggctacgttatcgagaagtgccaaggttcacaccttggggtgcgcgagccagccccaagctctgtaaccggaagctaaacagccatacggggtagaaggcagtgctttcgggagatggccgcccgataacatcgacgaggctcactttaccggcaagtccttcgggacgaaccgagaatccgtaaggaggaaatcgaaatgcagcga

SEQ ID NO: 132 - DNA, 1299 bp, Unknown
  Ga0137384_10001405 JGI
atgtcacggattttcgttgtggatgcccagcgcaatcccctgatgccttgtactcctgcgcgtgcccgcctgctgctcaaagcaggcaaagcggcgatcttgcgccgcgcccctctggtgttgattctcaaagagcgtcggccagaggcggtggtccagccattgcgagtcaaacttgatcctggagcaagcaccagtgggatcgccgtcgtcaacgatcgctcgggggaagtggtgtgggctgcagaagtgacccatcgcgggcgagagatccgcgaagctctcaccagaagacgagcggtacgccgccagcgtcggcgtcgacagaggagatatcgccccaaacgctttgccaatcgccgtcgcccgttagggtggctagctccctctttgctctcacgtgtgctgaatctgctgacctgggtggcgcgtctgcgaagcttttgtccgatagaagcactctcgcaggaactggccagattcgacacccaggccatgcaagatccgaccattgctggcatccagtatcagcaggggagccttgctggatatgagataagatcatacttgctagaaaagtggcaaaggcgttgtgcctactgccagcagccctcgacgaagttgcaagtcgaacatctgattcccaagagccggggagggagcgacagaatttccaatgtggtgctggcctgcgaaatctgcaacatcgccaagggtgacaggacggctgaagagtttggttttgtgcagctgatggctcaggcaaaagtaccccttgcaagtgcggcagtaatgaatgccacccgttggaggttgtaccaggagttgcaggcgataggcttgccagtagaagtggacaccggggggagaacaggctacaaccgtgccattcgccagcttcccaagcagcactggatagacgcggccctggtggggacctcaactcctgaacagctccaacttcagcacgttcgcccctggcagatcacagccaccggctggcagcggcgtcaaatgtgcctggtagatggagcaggatttccacgcacccgcgccaagcagcgatccctggttaagggattcaggaccggcgacctggtagttggcgtggtcaagagcggaacgaaacagggcatctacaaggggcgcgtggcggtcagagcttctggttcttttaacatcacgaccgacaaagtcacgatccagggcatcaatcatcgctggtgccgggtgctccagcggcgtgatggatatgcatatcagcaacgagaggaggcggcgtttcctcccaccccttga

SEQ ID NO: 133 - DNA, 297 bp, Unknown
  Ga0137384_10001405 JGI
gtcagatgcccaagcctctgtaagggggcgggcttgcccctatctggccagtcccctcggtgttcgcactgaggagccctttgggaggagcgcccaaggtcgcacgtcggggtgaccggatcagccccgacccctgtaagtcggctggtaaacagctttggtgggagaaagcagtccagtggacagatggccgctcccaaagcggacgaggaccactttacctgagcaggcaactgctcagcgacgccccattatcggggtccgcagtgcgggaaaggaaagcgtgcgatgtcacgg

SEQ ID NO: 134 - DNA, 942 bp, Human gut metagenome
atgtcaaccggccttcgggccgagcaagcggagcctgcgggtatccgcaaaggagacactttgaaagtatttgttttgaacatgcgcggcaagccgctgatgccgtgttcgcctgcaaaggcgagacacatgctgaaagcgggcaaggccgtcgtcttgcgacgcacgccgttcacgatcagtctgaccgtcgccacgggcgagacgaagcaggaagtgacgcttggcgtcgatgcaggcgccgaacacgttggcatttccgccacgacggaaaaggaggaagtcttcgcgtccgaagtcgagcttcgacaggacatcaagggacttctggctgatcgtctggcattccgacgtgcaaggcgcaatcgcaagacgcgctaccgcgcaccacgcttcaacaaccgcgttcgatccaagcacaagggctggcttgcgccgtccgtggagaaccgcattcaggcgcacatatcgcgcattgaagcggtttgccgagtgcttccgatcaccaaaatcgtgattgaaaccgcatccttcgacattcagaagatcaaaaacccggagattgaaggcgaaggctatcagcagggcgagcagcttggcttttggaacgtgcgcgaatatgtgctgttccgcgacggtcacgtttgccaagcctgcaaaggcagatcgaaagatctgattctcaacgtgcatcacattgagagtcggaaaacgggaggcgacgcgccgggcaacctcattacgctctgcgaggcgtgccacaaggcgtatcacgcaggcaagttgaagcagttcagtccccggcgcggcgcttctttcagggcagagactttcatgggcatcatgcgttggacggtgctcaaccgcctgcgcgagcgccatcccgaattgcctgtcacgaatacctacgggtatctgaccaaacacaagcgcatcgtcgcg

SEQ ID NO: 135 - DNA, 278 bp, Human gut metagenome
gtcaataacccccgcctgaaggcggaggcttgaaaaagcctttgttgactagtctcagcaaacctcttccgggaggggagctacgttggttgggaatgtacaggcaccgtgggatgttcatcctagctccacgctctgcggccagtggttaaaagctctgagaggtaggagcggtgctgctggcaagaaaccctttccaacattgacgaaggatgtcaaccggccttcgggccgagcaagcggagcctgcgggtatccgcaaaggagacactttgaaa

SEQ ID NO: 136 - DNA, 411 bp, Unknown
  Ga0137365_10006127 JGI
ctacaagagagcgtgctcaaaattgaccctggcagcagaaccagcggcatgaccctggtgcgggcagaagagacgccagcgggagaggtgcatcatgcgctcttttgctccgaagtgcagcagcgaggagagctcgtccatcgaggcaagcagacccaaagcaatgcccgacggcgtagacgcagtgccactctgcgtcaccgcgcgccacgcttcgacaaccgggctgttgccaaagggtggctgccgccctcgatgtgctcccgtgtgggtaacatcctcacctgggccaggcgatacagccgatgggtgcccgtcggcacctggacgggaggacgaacgcggtggaaccgggcgcgcttgggcatcgcgaaaacgcatgccaacgacgcgttgtgcgtgggagagatc

SEQ ID NO: 137 - DNA, 319 bp, Unknown
  Ga0137365_10006127 JGI
gtcaacgaccccagcgctgaagcgcggggcttgcaggatcttcccgcaggcccgtcgttgtccagcctgagttcctgatcccgcaggtagggagacgagggaactccgttcgtccggtcaggacacccaggaacgcctcctcaattcctggccctgtcgtccagcattaaaagcccgttcggggtgtcgggcggtgtgctggacaagagcaagccggaggaacattggcgagaggagctgcctgggaacgccgtcccaggcgcgtcagacagccccgtaaggggtcccgaaagggaacagaaaggcttcaacagtcatg

SEQ ID NO: 138 - DNA, 699 bp, Human gut metagenome
ttgagagtatttgtcctaaacaaacgcggaaaaccgctgatgccctgttcaccggcaaaagcgcgccttctgcttaaagagaagaaagctattgtgaagaggcgaacgcctttcactattcagctgacgattgcaacgggtgagtccaaacagccggtaagcctgggtgttgatgccggatacaaacatgtcggcctttccgcatcaacggaaaaggctgagctttatgcatcagaagtcgaactccgtcaggacgtctctgatctgctctctgctcgtcgtgcgttacggcagtcgcgccgtaaccgcaaaacgcgctaccgtgctccgaggttcgacaaccgcatccgcaccaagcgcaaagggtggcttgcaccatcagttgaaaaccgaatcaacgcgcacttgtcgcgcatagaagcggttcttcgactgctgccggtcacgaagatcaccgtggaaacggcgtccttcgacacgcagctgctgaagaattcagacattgcagggaaaaagtaccaagagggcgaacagctcggcttctggaacgtccgcgagtacgttcttttcagagacgggcacgtttgtcagcattgtcacggcagatcgaaagatccggtgctcaatgttcatcacttggagagcagacgtacgggcggtgattcgcccggcaacctgattacgctttgtgagacgtgc

SEQ ID NO: 139 - DNA, 247 bp, Human gut metagenome
gtcaactacctcggcctaaaggccgaggcttgaaaaagcctctagttgactagcctcaggccgtcgtttggcggactacgttggtcgggaacctataggcaccgcgggatgcagatcctagtcccgcgctctgcggccgatggttaaaagctctgagaggcaggagcggtgctgtcggcttgaaaccccttccaacattggcgaaggatcacaaccggtcgaaagaccgaggagataaaacttgaga

SEQ ID NO: 140 - DNA, 1389 bp, Human gut metagenome
atgagcgtacttgtaatcgggcaaaatggaagggcgttgatgccaaccaccacaagaaaagcccggatcttgctgaaagaaaacaaagcttctgttgtatgcagacatccgttcacgattcatttgcggtataaaaccggatgtgcgacacaggaaggaagcatcggtatcgatactggttcacaacatatcggaatcggagtcacctgtggaaataaagtgatcctcaaagatgaacatgaattacgttcttttatggagaagcgttccctgatggaaacgagggcaacaatgcggcgtggacgcagatatcgaaaggtgcggtaccggaagccaaagtggaaacatcatacaaaacgtatgtatttcgagaaggcgaaccggaaaggccaacactggagaaaagtaaaaacaaccacacagtcaccaagaccggaaagctggctgccaccgtcactacagtcaaagtgcgaccaccatttccgtatcattgaccggtatttgaaatgcctgccggattcaatcacgaagaatttagtgatcgaggtaggacgttttgatatggcgcgcatgaatgatccgacgatccatggtgaaatgtaccagcgtggtccgatgtatgatacagagaacctgagagcgtacattttcgcaagggatggatataaatgtgcctgctgcaaagcaaaggcaggatctatccgaaagaaagatgggacatccgtgaaactgattgcccaccatatccagttccgcagtcgcggagctacggacaatccaaaatatatgatcagcgtatgcgatcactgccatacgacaaaggcacaccagcctggtgggatcctgtattcctggatggaaaagaataaaaaagttacccgcggattaagggatgcgacatttatgaacatccttcggagacgattatttgacagatttccacaggcagcatttacatatgggaatataacagcggttgaccggaaacgtttactgcttccaaagagccatgcaaatgatcctgttgcaatctccctgtttgggaaagatgtttctgtcatcaatgccacttgccagacgttacgttataagcaggtgcgaaaatccaaacgttctctgcatgaagcaacaccaaggaaaggacggaaggaaccaaatacaaaagcgattcgtaataagaagaacacaacccatgtaaatggatttaagctgtgggatagtgtgcttgtaaatggacagaaactatttatttgcggtttcacaggctctagtgcatatctggttgatcaggatggacattatgtatcgcctcctgggaaaacatacaaacagtggacattatcgaagttgagccggttgcatccaaatggtaactggctgatggcgtaa

SEQ ID NO: 141 - DNA, 327 bp, Human gut metagenome
gtcaagttacccaccgcttagatctctgatgaaatcttgaagcgggggcttgaaaaagccatttgactagcctcagtgattttggtaagtctgtgctggtccgccggatacagatactgtcagataaactacgttatgagtgtcatgataccatcctgtgaaccctagcaggaagcggtatccgggcaaccgatcgtggtgtgggaacccacacggacccgaaaactcaagcctcatgacattggcgaagggaccttacgcgggcacgcggcagggacggtttcgttccctgtgtaatgcaataacataaaggaggcgcttatgagc

SEQ ID NO: 142 - DNA, 1338 bp, Human metagenome
atgacaaaaacactaaccaaacaaactacgcaagcttgcgtgttagaccaacacggtaaaccgttaatgccaaccacacgtcttggcaaagtttatcgtcttttaaagacacaaaaggctcatattgtgtcttatgagccattcacaatccaattggattataaacctgacacacatgttattcaaccaatgacacttggtgttgatagtggtgctattcattcaggttattctgtagctaatgaacaacgtgaattttatagtagcgaagttattgcacgtgataatatttcgtctcgtatatcagatagacgtatgtaccgtcagactcgccgttcacgaaaaacgcgttatcgtaaaccacgtttcaataatcgtaaaaataagaaaaaaggttggttaccaccatctcttgaacaaaaagttgctgttcaattaaatgaaatcgaccatcttcatcgttattttccaattgaaacaattattgtcgaagtagctgagtttgatattcaaaaaattaaaaatcctgatatttcgggaaaagattatcaacaaggaactttacaaggctataatattcgcaattatcttcttgaaaagcatagtcgtaaatgtttttattgtgataaagaagtgtcaacttttgaagttgaacacatgattccaaaagctaggggtggttctaatcgtattgacaatttaaccttatcatgtcataaatgtaatcagaaaaaaggaacactaacggcagatgaatttatcaaacgaactttaccggttgaaaatgccgctaaaaaattaaaacaattgtctaaagaaaaacgattgtttaaatatatggcgcatatgaatgctacaagatggacgttatataatgcaattgatgacaaatatccaaatgtcaaaatgacttatggttatattacgaaatacaatcgtattcaagcaggtcttccaaaagcccatcatatcgatgctaaatgtattacgggctttgctcaagtaccatcatttgatataatggttgttaaaacgaagatgcgtaggcataatcgtcaattgcatcgagcaacatttagtaaaggtcatgtacgtaaagcggcaagtttgccgacagttatgtttggctttagattatatgaccgtgtattatataataatcaccattattatataaaaggtcgtcgaagtacgggtttatttgcacttgcttctgttgaaggtttgaaagacgaaagcagaacttatagaaaattgacatttttggcgcatacgaacgcttatttgactaaccgatacattaacaatgatacagtaacaattttaattaaaaaatag

SEQ ID NO: 143 - DNA, 336 bp, Human metagenome
acataaattaataaccaccccgctgaagtgggcggtttgcttgactcctttaccgtgagttaatcaaacctttattgattagcctcagtgtaaactacgttacttgtaaatatataggtaccttgagatgtctgcctagtcccaagctctacgcgttatcattaaacagttctaaggggtaggaacagtgtaatgacgatataaaactacaagataacattggcgaaggcaacatagggtttgtttatacccgcttaccgcataaaataaacaaatttaaacgaaaggactttgtcaaaacgtatgacaaaaacactaaccaaacaaactacgcaa

SEQ ID NO: 144 - DNA, 1020 bp, Unknown
  Ga0070706_100018127 JGI
atgtcacaagtctttgtcttagacacgaccaagcgaccgctcaacccggtgcatgcggggcgtgcccgcttgctcttgaagcaaggcaaggcggcggtgtatcgccgctatccgttcacgatcatcctgaagcgcgcggtcgagcaaccttctcttgaaccgcttcgagtcaaagtcgatccggggagccaaaccaccgggctggcggtggtcaacgatgccagcggcgaagtcgtgtgggccgctctcctgacgcaccggggtaagcaaatcacgcgcgatctggcgagccgccgcacggtcagaaggagtcgcaggcaacgcaggaccaggtaccgcaagccacgcttcgacaaccggcgcaaaaagaaaggcacgctgccgccgtcgttagagagccgaatctgcaacatggtcacgtgggtgcggcgtcttctgcggctgtgtccggtagcggccatcagtcaagaactcgtgaagttcgacctgcaacagatggagcagcccgacatcagcggcgtggagtaccagcagggcacactcttcggctatgaggtgcgcgagtacatcctctcgaagtggcagcaccagtgtgcctactgtgaagcccgtgaggtgccattagaactcgatcacgtgcaccctagagccaagcatggctctaaccgggtgagtaatctcgtggcggcctgcacgacttgtaaccagcgcaagagcaaccaggatattcgcgacttcctcgccgatgatcctgagcggctggcgcgcatcctggctcaggtcaagacgccgttgcgggatgcagcggcggtcaatgcgacccgctgggcattacacgaccgactcatacgggtagggctgcccgtggaatgcggcagtggcgggaggacgaagtacaaccgcgtgaggcgggggctgcccaagtcacattggctcgatgcggcgtgcgtgggggccagcacgccggagcacctggacgtgcggggcgtggcgcccctgcacattagggcgacagggcac

SEQ ID NO: 145 - DNA, 297 bp, Unknown
  Ga0070706_100018127 JGI
gtcagagacccgtcccgttcaacgggacgggcttgcgtggtaccacgcaggccccgctctgaccagtctcagccaccagtctccaagggactgacggggctccgttggaagcgaatgcataggaacgtccgggtgcttcaccagcccggaccgcttcggggtagcattaagcaggctgaggggtaaagccagtgtgctgtccaccggaaaccgcttcacaacgttgacgaggtgagcattacctgggcaaccagaggcccatgcgggcacatcaccaaggagtcatgtatgtcacaa

SEQ ID NO: 146 - DNA, 702 bp, Unknown
  Ga0137383_10047051 JGI
atgagcaaagtgtttgttcttgatacccacaaacaaccattaaacccggtgcatcctggcagagcgcgtctcctgctctcctctggcaaagcggcagtgttgaagcggtacccatttacgatcatcctcaaaactgtggtcgagcagtcggtccttgagccgttgcgggtcaagattgatcctggcagcaagacgaccgggctggcactggtcaatgatgccacaggcgaggtcgttttcgcagcggaactggagcatcgaggtgagcagatcaccaaagcccttgccaggcgagccttccccaagacgcattggctggatgctgcctgtgtcggcaagaatacgcctgagcgtcttcgcctcaagggggttgtgccattgctcatcaaagccaacgggcatggctgtcggcaactgtgtttgatggatgagcatggcttcccacgcaccaagccgaaacagaagaaatttcggcatctgtttcggacgggcgatattgtccaggccagagttccggctcacctcaaacacccaggcgtccatgtgggtagagtgtctgctaaggcaaacggagccttcacgattgcgaccagatcagggaaagtcaccgatattggcaagaagtattgccgctgtctgcaacgggcagatggctatggctatctacagaaaggagaggaggcatttcttcccgccccctaa

SEQ ID NO: 147 - DNA, 247 bp, Unknown
  Ga0137383_10047051 JGI
gtcaggaacccatcccgtagaacgggataggcttgcagaagcaagtttgaacctgacccgactcagctcgacaacgggctacgttaggagcgaatttaggtacgtttgggtgcgaggccagccccaacctctacggtacaacattaaacagctgtaacgggtgaaggccgtgtgttgtacgtcaaaccgctccataaccttgtcaaggccaccattaccctcgcgagaggaggctcgcatgagcaaa

SEQ ID NO: 148 - DNA, 1251 bp, Unknown
  Ga0373956_0000940 JGI
atgaaggtttccgtcgtatccagggaaagaacaccacggatgccgacgacttccaggcgggcccgcctctggctcaaagcgggacgcgcccgagtggtgcatagtgagccatgtcccatccagatacggtgtgacactacaacgtctactcagcctgtcacggtggatgtagagacgggatcccagacaggtaggatcgccgatggggaggttgtttccctggctgaggtcgtcctgcgcaccaacatcagccacacagtgaggcaacgacgccaggactgcagaaagaggcgaggccggacaactcgggatagacaggcccgatgtgcgaaccatcgccgtaagccagggtcgcttgcactgtcagtgcgagccatcgccaagacaactgtcaagaccgtgcgcgttgtggccactggagtgccagtggggcgggtcgatgtggacgtcggacgcgttgcgacgcagacggtgcagactcccgacatctccgggtggcaaggccagcatagtgcgcttcaggactctcatcttcgtgaagacctgcgtgccagatggcacacgccatgcgcctcctggcacctgagtgcagtgccgctccagggagagtatctgagacccgtcagccgaggagacaacgattgcgcctcgcacatggcaatcgcctgtgcggcctggaatcaggcaaaagggaagcacaccgccgccgagtgtgtgtttccacaggttcaggctcaggcatgggtggccctcacagatgcagcgcatggagcgagtgaaaagacagtgagtgtgtaccaatgcagggatctctgcggatcggattgggtgacgatcacagttggctctgcaacgaagaagacacgtatgcaaatccccggccttcccagctcgcacaccaacgatgccatcgcgatggcctgtgcaggaggcgaggtggtaaaaccacatgcggtcgcctcccacttgcacaacgggaaacggagtgagcacgcggtctgggcatcttgcatggtcaaaggctggaaggtggacgaagtggtgaacgtcaaagggcggatcggttccattggtagatggtgtctcacaggagcgtatgtggtcaaggatctgacgagtgggaaagcatgtgtggaggtgacatcacgcatactcgaacggttggcccgtccggtacaaggctggatgatcactcgtctttctttctctcacatcagaggaaaggagggtggcgcttcctcccctgtctga

SEQ ID NO: 149 - DNA, 305 bp, Unknown
  Ga0373956_0000940 JGI
gtcaatgacctgtcccttccagagggagatttgtgagagcaaagctcttgcgcgtcggattgaccagactgagcctcagtgccaggcgagccgagcacgtgagcgtcccatctgggaaagaagaggcgacgagatggctatgtgttgctcttctgactccagcgtgctgccccggcgtcggaccttccatcgcctgatctcaccagcggtgaggtcagcagcagtggtcaggagaacgaacggggtcctttctgtgtcgaggggatcacatgtcctccaatcggaagagaggagccttctctgat

SEQ ID NO: 150 - DNA, 1338 bp, Unknown
  GENOME_ACESSION: mgm4547164.3 MG-RAST
  MISC_FEATURE (1105)..(1227): Any "n" represents any nucleotide
atgcagtatgtatttgtattatccagaaacggttcgccgctgatgccgacaacatgcggtcatgccagaaaactgcttcactccggcagagccgatatcgaaaagcacgagccgttcacaatccgtctagatcatgacgccgccggtattcagcctgtcgagtataagacagataccggggcagtgcatgtcggtgtatcaatctgctcggcgaagcacgaatatgtgcatgcacggttcgatatgctggctgatgagaagctgcggcatgacgattgccgtaagcaccgcagagcaaggcgcggcaggctaagataccgtaagccgcggttcaacaaccgtgcaaagccaaaaggctggcttgcgccgacgaatcagcacaagctggatacgcaggaaaatctgttcgccagatatgctgcagtctgtccgatcacagctggatacttcgaagtcggcaagtttgatacatcagcgattgaagcaatcgaacgcacaggtgttaagccggaaggcacggactatcagcacggctatcggtatcagatggccgcactcaggaatgccgtgttttacagagatggctacaaatgccagatttgtggcaagtctatcaaagacggtgcaattctcagaatacaccatattggtttctgggcaggtgatcatacgggccgcatggcaaatctgctgacggtatgcacaaagtgtcatacgtcagcaaaccacaagcccggcggcaaactgtatgatctcaagccaaaggttggcaatctgtctggcgcagcattcatgaatcagattcgccggaagatcatatctgatctgcaggaaaaataccagagcattgcattccatgcagtctatggatcagataccaaagtccgcagacatgaccggagtatcacaaagagccatgctaacgatgcatatgtgctcggtacgctcatttcgaagcatcggacgcaggagaaacactttgcaaagcatcgcagaaacaaccgtattctgagtaagttctacgatgcgaagtatattgacattcgggataacactacgaagtctggtgcacagctaagctgtggacggacggatcgctctgagnnnnnnnnnnnnnnnnnnnnnnnnnnnnnnnnnnnnnnnnnnnnnnnnnnnnnnnnnnnnnnnnnnnnnnnnnnnnnnnnnnnnnnnnnnnnnnnnnnnnnnnnnnnnnnnnnnnnnnnnnnnagagtagacattctgaaaagaacgaacgcatcttcagaggccggcaggtgcggaaaggcagagtttccatcaggaaacaacactatccgtatcagcctggcgacattgtga

SEQ ID NO: 151 - DNA, 468 bp, Unknown
  GENOME_ACESSION: mgm4547164.3 MG-RAST
gtcagccaccccatgactaaagtcaggggcttgcagggaagaaagaaaaaggcgttgcttggtatttcttcttaggaaagccatagctgatcagcctcagtgtttgtatcatcgttctgcgatgcgctgcagatactacgatacctgagaatcctgtgagtaatcacaacataacaggcaccagcgaatgctccacaagtccgctgctctgcggaacgtcattaaacatctctgagaggtaggagaagtgtggcgttcagaaaacctcaggcactcattggcgatgtggactacggcactggctcggcttcggctgagtacaggctcgaatctgcaaatagtccgatatccaatccgaacgtttgcagaggtgcgtaagcaccgattttttccaaacacactggtagatggtgtgtggttcattgctttatcagcattacagagaggaggcatcagcctatgcagtat

SEQ ID NO: 152 - DNA, 726 bp, Unknown
  Ga0256831_1010291 JGI
atggtttttgtattagataaaaccaaaactcccttagcccccactacggagtctaaggctagaattttgttaaaaaaaggtaaagctgttgtgcataaaatatttccctttaccataagattaaaagagaacaaaacgtgtactaaacactttgaaataaagtttgatgtaggtgcaaccgttacaggtgtagcgattgttgatgcactaaaatgctttttctttgcagaaatagtgcatagaggaaaagccgttaaaaaagcaatggattcaaggagagcaataagaagaggtagacgagatagaaaaacaagatacagagaagcaagatttgataatagaacaagaccaaagggttggttacctccaagtgttaaatcaagagcagataatgttattaactttgcaaaaaaatatgcaaaactaatcccattaaaaatggctacagtagaaaaagtctcttttgatactagctctatgactaatggtaaaaagttgcatggagtagagtatcaaaatggtagccttaaaaatacaaagttaagagagtttatctttatgaagaacaactacaaatgtgtatattgtggaaatcatggagaagagatagaacatattattcctcgctcaaaaggtggaacaaattctgttcaaaatttaacacttagttgtagaaaatgtaacgaacttaaaggcaatctaactcttaaagagtttggtaaaaaa

SEQ ID NO: 153 - DNA, 275 bp, Unknown
  Ga0256831_1010291 JGI
gtcaataacctctcccaaaccttaacggttagggaagaggcttgattgaccagactaagtagctagagatagccaactacgataatagtgttatcacaccttggaatgcttctccagttccaagctctatgtaggctctttaagttgggttaaagccctgtgaacctaaggacgattcgccattgcgaacaagcatttttatcattgtcgaggagagaagcaaagcccgtcaccactgaaaagtgagttaatctgaaaaaggatttttaaaaatg

SEQ ID NO: 154 - DNA, 834 bp, Marinobacter lipolyticus BF04_CF-4
  MISC_FEATURE (358)..(358): Any "n" represents any nucleotide
  MISC_FEATURE (411)..(411): Any "n" represents any nucleotide
ctgggatcacgctggcgaaaggtaaagcgccgaaggttccggtcgccgcgcaagcgggagccggtgatagacattcccgaggggagagaggcttcggcctccgttactaggcccgtaagggcattcattgaaaggaaaacgatgtcggtcttcgtactggatagacgcaaacacccccttatgccgtgcaccgaaaggcgtgcgcggcttctactcgaccgtggtcaagcggtggtggtgcgtgcgtatccgtttacgatccggttgaaaagccgggttggcggaaatactcagccggtccggatcaagatcgatcccggcagcaagaccaccgggattgcagtggttcgagaaagcngccagaagcaacacgttctggcgttaatggagttggctcatcgcggtcgccanatcagcaagtctctggagcaacgtcgggcgtttcgccgccggcgtcgcaaccagctgcggtacagggcaccccgatttaacaatcgaaccaagcccaggggctggctggccccgagcctgcaacaccgggtggataccacgaaaagcttggtgaatcggcttcggtctttggtgccggttgaatttatcagccaggaactggttcgattcgacacgcagaagatggaaaacccggaagtcagcggtgtcgaatatcagcagggcaccttgctcggctacgaggtccgcgaataccttctggagaagtgggggcgcgaatgcgcttactgcaccgacaaagacacccctcttcaaattgagcatatcgacccaaaagccaacggtggctcgaaccggatcagcaacctgacattggcgtgccgg

SEQ ID NO: 155 - DNA, 295 bp, Marinobacter lipolyticus BF04_CF-4
gtcaactaccccgccctgaaggacgaagcttgtagagaataccctgcaagccaggttgaccagggagagcggacaccaacccgctacgtttatcacaggtcgctaagactcatcgccgaatgcttcctcagttcggcgctctgaaagactgggatcacgctggcgaaaggtaaagcgccgaaggttccggtcgccgcgcaagcgggagccggtgatagacattcccgaggggagagaggcttcggcctccgttactaggcccgtaagggcattcattgaaaggaaaacgatgtcg

SEQ ID NO: 156 - DNA, 927 bp, Unknown
  Ga0307968_1027799 JGI
atggcggtgtatgttctggacaagaaaggcaggcccctgatgccttgtaccgaaaaacgagcgagattgctgctggagcggggccgtgcccgggtgcattattgtgtgccgttcgtgatccgtttggtggatcggctgcaatcggagtccgagcttcagtcgctgacggtgaagattgatccgggcagcaaggtgacgggcattgctttggtgcgggagcgcgaaaagaaggtggttgtgctatccctgatcgaactggtgcaccggggcgccagttcgatcaaaaaatccctgggccagcgagccgggtaccggcgtcgccggcgtagtgccaacctgcgccaccgggcaccccggtttctgaaccggaccaagccgaaaggttggctggcaccaagccttcagcatcgggtgaacaccacgctgagttgggtagaccggttacagcgctggacgccggttgccgaactggccgtggagcgggtgaaattcgacatgcagaagatggagaacccggagatccaggatgctgagtaccaacaaggcaccttgatggggtttgaggttaaggagtatctgctggcccggcaccaacacacttgctcgtactgcgctggcctgtccaaagaccccatcctggaggtcgagcacatcgttccccggggcctgggtggcacccaccggattgggaatcttacattagtttgcaagacctgtaatggggacaagggcatgcacgaaccgggtgcatggcagacgctctgtgagcggagcaagactgccatcaacaaggctcgcgccaagagcatggcccgcatcctggatggctaccgccccaccctgaaagatgcggcggcggtgaacgccacccgcaatgccttgtttcaggatttgctggcaacgggcttgccggtggaggccggcact

SEQ ID NO: 157 - DNA, 298 bp, Unknown
  Ga0307968_1027799 JGI
gtcaactaccccgcccttaggacggagcttattggggcaatccgaagagctaggttgaccaggaagagcggtaatcaatccgctacgttacacacagggtacaagacccacctcgccgtgcttcctcagcgacgggctctggaatcgaccgatcatgctggcgaaaggtaaagcgtcgaaggttgggagaacggcttaaagccagtccggtgtgtgacattcccgaggggagcgaggcttcgacctccgtcacaaggcccgtaagggttttaattgaaaaggaagcgttttgatggcg

SEQ ID NO: 158 - DNA, 1165 bp, Moorea sp. SIO2I5
atgcaaaattatgtttttgttattgacgcgaacaagcaaccattaaatcctattcacccaaagaaggctcgccgcctgctagaaaaaggaaaagcagctgtctttagaatgtatccatttacaatcatcttgaagactgcgtacgctaatccagttatctcaccttgccaaataaaaattgacccgggtagcaatactactgggttcgccctggttcgagacgggcaagttatttggggaatggaattaaaacacagaggaggattgatcaagaaaaaactggaatctagaagagctgtcagacgcggaagacgtaatcgcaacactcgttaccgaaagcccagattccttaaccgcaaacgaccacagggctggcttcctcctagtttagaacacaggattttgacaactgaaacttgggttaagcgattaattaaattctgcccagtctgtgaaatctggattgaacgagttaagtttgacactcaaaaaatgccaaaccctgaaatcagtggagtagactaccaacaaggcgagttagctggctacgaagtcagagagtatttactcgaaaagtgggggatagaatgtacttattgcgggaggcaaaatgtccctctacagatcgagcacattcacccaagatcaaagggtggtagtaacagagtaagtaatctctgtttggcttgcgaaaagtgtaatcagcgcaaaggaaacaagcccatagaatagtttataaaaaagaaacccagcctactacaaaaaatcaaaaccaaagccaaacaaccattattggatgcagcagcggtaaacgcgactcggaacaaattggtcaaggtattgaaagatactaaagtagtcgtcactggaacaggagcgcagactaagtacaaccggacaaggctaggactacctaagcagcacgcttattgacgccgcttgtgtaggaaatattgaaaacttagatctcaagaccttacaacctctatttgttacctgtaaagggcagggaggacgacagaaagcggctctcaacaagtacggttaccctattaggcacaacccactgaagcctgttaaaggatggatgactggggatatagcgagacaccagaaactggggataggcaaagtcacccctagtggtctgtcaaactcattttga

SEQ ID NO: 159 - DNA, 251 bp, Moorea sp. SIO2I5
ctaagccttggtaattcccggtaactccaggaattgccaaccaggatgcagactaagtattcatttactacgttgttcaagccatgatacctacaaatgaacgccagtttgtagctctatcgctaactattaagacgaaggcaaccgtgtagttagctcaacaagcttttacaacattgtcgttcgcgcaagcgtgtgcgaagcactcggcacaccttaccaacttgaggcatttaacgatgcaaaattat

SEQ ID NO: 160 - DNA, 999 bp, Geitlerinema catellasis PCC 7105
  MISC_FEATURE (675)..(774): Any "n" represents any nucleotide
atgcacgttttcgttctcgacaaagacaaaaaccccctagcaccatgccatccagccaaggcgcggcggctcctgaaatccggtcgagcttcggtatttcgtcgctatccatttacccttatcttgcacgagattgaagccaaagattgtgtcgttccggaaactcaactcaacgcttcggctccgctcgcttcgacttcgctcagcgttgagtccgagcggagtcgaggactcaaaatcgatcccggctcgccaacaactgggttggctatcctgtccgaaaaccgagtcatttgggcgtccgaactcagctatcgcggacagcaaattaagaacgacttagagaaacgtcgcgctttacgacgctcccgacgccatcgaaaaactcgttaccgaaagcctcgctgtcttaaccgtactcgtccgaagggttggcttccaccgtctctcaacgcttcggctccgctcgcttcgacttcgctcagcgttgagtccgagcggagtcgaggactcaaccatcgggtcgaaactacgatgacctgggtgaaccgtttgcgaaaacttttgaaagaaactggattgcccgttgaagtgggaacgggcggacagactaagtttaatcggactcgattgggtttgccgaaaactcacgggttcgatgcggcttgcgtcggnnnnnnnnnnnnnnnnnnnnnnnnnnnnnnnnnnnnnnnnnnnnnnnnnnnnnnnnnnnnnnnnnnnnnnnnnnnnnnnnnnnnnnnnnnnnnnnnnnnnggaattcccctcccgctaatcctgtcggatataacgggagtccccttcccgcattttagatggaaatttatagcagtcgccaacagaatctttctcctcaagaagaacgcgacctttccgcacttgccgaacaagccaaacgcgctcttgaggacggtgtcgtctcgcgagaagaacgagatgcactcattgcggcaatttatgccgatggaaaagtttcggtag

SEQ ID NO: 161 - DNA, 258 bp, Geitlerinema catellasis PCC 7105
gtcaacaacccgccgtcaagcctgttggctatgacgggggcttgaaaaagcccacaagttgaccagcctaagtcttccgaagactacgttacgtccgagagtttaagttcctaccgacgagtacgttgccagcttgtcgctctagaactgaaaagttaaacagcttaaaacgggttaaggcagtgcttttcagatagtaccgagacgtaaccttggcgaggcaaacgttaccccttttgggagttgtgtattatgcac

SEQ ID NO: 162 - DNA, 1278 bp, Methylobacter whittenburyi
atgacgggtaaccgtcaacttttcaggtttacaggaatgaataaagtttttgttttggatcgcgagaaaaacccgttaatgccttgtcatccggcgagagctcgacagttattggatcgtaaacgggccaaagtttttcgcttacatccattcacgatcattttgcaggatcgagccggcggcgctgttcagccggttgaaatcaagctagatccaggcagcaagataaccgggattgcgataaccgttttgggcgataacggacgcacgcttgtctggtcgtgtcacttgagccatcgcggctgcactattaaggatagcctgcaaaaaaggcgtgggattcggcgtagccggcgtcatcgccattgccgataccggcagcctcgcttcgataatgtatttacctgggttaagcgcttgctgagctggacaccgggacagtgtattcatgttgagacggttaggtttgacacacaaaagctgatgaatcccgaaatatcgggcgccgaataccaacaaggtgagctgcaaggttatgaggtttgcgaatatttgctggaaaaatttcaccgaacctgtgtctattgcggtttaggcgatagaccgctggaggtggaacacgtagtagccaaggctaacggtggcagcaaccgggtctccaatttagcgctatcctgtcgggattgtaatgaacgtaaaggcactcaacgggtagaggatttcgtaacggaccctgttaagctggagcgattgcgcaagcagctaaagacaccgctaaaggatgcgactgctgttaatgcaacccgttatgctattggcaacaaacttaaaaacctgggtttaccggtccggttctggtcaggcggacgcaccaagatgaatcgaattcagcaaggttacggcaaagatcattttatcgatgcggcttgcgtcggcgataccggtagtcgcgtgtttattccggaagccctaacccctttaaccatttccgccaaaggacgtggtaaccggcaaatgtgcctgatggataaattcggttttccccgaacccggcctaaaggcgttaagcaagtcgatggctttaccaccggcgatagcgttcgactcaatcagccccgaggcaaataccggggtagctggacggggagtatcagtattcgagccagcagggtttttgacattacaacccgcaataaagaaggcaaaaaccaaaagatatcggcgtccagtcaacatttcgttcggcttcaagggtttgacggctatgtttacggctaa

SEQ ID NO: 163 - DNA, 332 bp, Methylobacter whittenburyi
gtcagcagcttaaaccagagttgagccctcgacttatccaagcctgcgttaaatccgtttaacacaagcttggctagggttaattaagtgatttaattaacggctcaacccgcctaagctgcttagtggcagctacgttagtcaagtgatcttaccctgggatgcttctccagtcccgggcactaaggcaataggttaaacagtgagcgatcgagagtgaacagtgcttattgcatgacaagctttactaaccttggcaaggagatatttaaccgcttcggcggataatgacgggtaaccgtcaacttttcaggtttacaggaatgaataaa

SEQ ID NO: 164 - DNA, 1224 bp, Unknown
  JGI24702J35022_10000018 JGI
atgttagtttatgttttgagcaaatctggaacatctttgatgcccaccgctagaaatggttgggtgcgaagggcgttacgagacggcagggcgaaagttatttcccgctcaccgttcacaatccggttatgttacgattctaccgagtatgtacaggaatgtacctgctcggtagatgcagggagtaagtttgttggattatcggtaaccacaggagagaaagaagtttatgcagctacagttcagttgagggcggatattgtagatttgttgtcaacaaggcgggaacttcgtcgttcacgcaggaacagaaaaactcgttaccggaaggcacggtggcaaaaccgtaaaaaaccagaaggttggcttcctccgtctgttagatggaaggtcgaagcccataagagggtaattgcaaagttacataagattttacccattagtaaaatcatcgttgaaacagcacagtttgacagccagaaaattaacaatcctgaaatatccggcattgactatcagatgggagaccagttaggctatcaaaacgtcaaggagtatgttttagtgagagacgggcacaagtgtcaggtgtgcggcaagggcaagataaaacttcatgtacatcatatcgaaagtcgtaagacaggcggaaatgcaccgaacaaccttgttactctatgcttggaatgtcatgatggtgttcataatggaacgaaacaactcaaaaagaaaagagggcaatcgttccgtgatgcaacacaaatgaccgtgatgagacccacactgttgagggaattgaaagaaatatatccttatgctcaagaaacctttgggtatattacgaaatttcacaggcaacaggctggtttagagaaatctcatgtcaatgatgctcggtgtattgaaggtaatatgccgactgttttgacaaagccttacctgattaagtttgtcagggctaataatagacagttgcacaaatgtacaatagccaagggcggttacagaaaatctaacaaggcggagaaatatgtctttggttttcggttgtttgatatggttaaatatcaaggacaagaatgttttatattcggaagacggtcttccggtagttttgatgtgcgattattagacgggacaaaagttagtgccggcatttcgtataagaaactaaaactgattaagaaaagtacaacaattttaacagaacgctgctcctcctga

SEQ ID NO: 165 - DNA, 263 bp, Unknown
  JGI24702J35022_10000018 JGI
caactacacagtagaaagtaaacaacccacacgctaaagcgtggggcttttagcccttgtttactagattaagtttaacgcccggtttgtccgggagacaactacgttgattaggaataaataggtacttcaggatgcttgttctagtcctgaacactacggtttacggttaaaagttccaatgggtaagaacggtgccataaacattaaacccttttcaacattatcgaagaacacctaactccgtaaggagatttacaatt

SEQ ID NO: 166 - DNA, 1554 bp, Leptospirillum ferrodiazotrophum
atgcttcctcagtcccgggctctggaagctgccgatgcagacaaccgcgagggccaggacgaaacggtcggcggcaagggagcgatcccgaagccggttgccaacattcccgaggggagacgcgtcgaaagaagcgcgttacggccgaaaggccagtgcaacgtaaggttcgacggaggattcgtgcaggtttttgtgctcgacaagaaaaagaagcccctgatgccctgccacccggcccgggctcgggagcttttgcgagagggacgggcggtggttcacaggatcgccccgttcaccatccggctgaaggaccggatcgggggcgaaacccagcccattcgggtcaaactcgatcccggatcgaagaccaccggactcgccgtggtccgggaggaagagacggacggggagaagaccgcccatgtcctgtttcaggcggagattcatcaccggggatccgccatcaaaaagagactggaccagcgccgggccttccggagacggcggcgaagtcagcttcgcgaccggacgccccggttcgacaaccggacacgtccggacggctggttgcccccgagcctgcgccatcggatcgacacgaccctcgcctgggtcgaacggctccggagactggttcccgtttccgaactgtcccaggagctggtccggttcgacatgcagaagatcgaaaacccggaaatctccggagccgaataccagcagggaaccctggccggatacgaggtccgggaatatctcctggagaagtggggccggacctgtgcctactgtgggtccgagaacgtgcccctcgagatcgaccacatccacccccggagcctgggcggatcggaccgggtctccaacctgacgctggcttgccgttcctgcaacctgaagaagggaaaccgtccggtcggggagtttctggcgaagacgccggagcgtctgtcgacgatcctcgcccgggccaaggccccgctgaaagacgcggcggccgtcaacacgacccggtgggcgctgtttcaggcgttaaaggcgacggggcttccggtcgagaccgcctccggaggacggacgaagtggaacaggactcggcttgtgctccccaagacccatgccctcgatgcagcgtgtgtcgggaaggtcgacaggatcgagggctggaaccgtccctacctttcgatcaagtccacgggacggggatcctatcagcggacccggctggatgcgttcggcttcccccgagggtctctgacccggacgaaagcccacttcggttttcagaccggagaccgggtcatggcgatcgtgacgaagggcaaaaaaaccggaacctatgccggacgggtggccgtgagaagctccggcagtttcaacatccagaccggctccggagtggtgcaggggatttcttacaaggactgtcggcttctccagcgggccgacgggtacggatattctatccatccgatcactgagaaaggagaagcgggagaggcgctacccctccccggcatgaatgccggactctcccgcgcaagaggatga

SEQ ID NO: 167 - DNA, 306 bp, Leptospirillum ferrodiazotrophum
gtcaaccaccccgcgctgaagggcggagcttgaaaggaggttcgacaggctcgggttgaccagggaaagcgggttccaacccgctacgttggcaacaggtacaagacccaccccgggatgcttcctcagtcccgggctctggaagctgccgatgcagacaaccgcgagggccaggacgaaacggtcggcggcaagggagcgatcccgaagccggttgccaacattcccgaggggagacgcgtcgaaagaagcgcgttacggccgaaaggccagtgcaacgtaaggttcgacggaggattcgtgcag

SEQ ID NO: 168 - DNA, 1290 bp, Unknown
  Ga0101770_1065076 JGI
  MISC_FEATURE (345)..(345): Any "n" represents any nucleotide
  MISC_FEATURE (370)..(370): Any "n" represents any nucleotide
atggtatttgtattagatattaatagaaaaccattatcaccttgtcatgaagcagttgcaagaaaattgcttaaacagggtaaggctgcaatatttaaaaggtatccatttacaataatacttaataaatctgtagataatactgacaataaacaagaatatagactaaaaattgattatggaagtaaacatacagggttggctatattacaaaataacaatgtaatatggttagctcaaatagatcacagaacagatattaaaaagaaacttgatgaaagacgtatgtttagacgcagtagaagaaacagaaaaataagatatagaaaaccaagatttttaaanagaaaaagaaaagaaggatggatancgcctagtttagaaagtagagttaataatataaaaacgtgggttaatagattacaaaaattaattccattaactcacatatcttatgaaaatgttaagtttgatactcaattattaagaaatcctgaaataagtggtattgagtatcaacaaggaattttatatggttatgaagttagagaatatttgcttgagaaatttagtagaaaatgttgctattgtggaaaagaaaacattccattagaaatagaacatataataccaaaatcaagaggtggtacaaatagaatagacaacctttgtttatcttgtcatgagtgcaatcaaaagaaaggcaatttgacagcagaagaatttggttatccagaggtacaaagacaagttaaagaaacgttaaaggacgctgccgtagtaaattctactagatggaaagtgtatgatgttttactacgaattggtttaccagttgaatgtggcacaggtgctttgactaaaatgaatagaattaaattaagattaccaaaaacacattatttcgatgcttgttgtgtaggacaaagtacaccagataaattatattttaagacaaaagatgttttgtatataaaagcaaaaggcagagggagtcattgtagaacaaatttagataaatacggctttccgagaggatatttagcaagacaaaaatatttctttggttttcaaacgggagatatagttaaagttgaaataccaaaaggaaaatataaaggcatttggtacggagaagttgcatgtagaaaatcaggtagttttgatattaaagacaaggaaggtcaaagagttgtacaaggcgtcaattataaatattttcaagtagtacaacgctttgatggatatagttatagaagggaggtagcaattcttacgcagcgtgtttaa

SEQ ID NO: 169 - DNA, 241 bp, Unknown
  Ga0101770_1065076 JGI
  MISC_FEATURE (66)..(66): Any "n" represents any nucleotide
  MISC_FEATURE (89)..(89): Any "n" represents any nucleotide
gtcaactacccaacggctaaagccgtgggcttgaaaccccatgttgaccaggctaaggtttgaaanagaacctacgttatctatgttangacaccctaggatgccctcccagttctaggctctgtcgtatagcattaaacaggtgtagtgggttaagccagtgtgctatacgtgtaagcatagataacattgccgagggagatgttacctgcgtaagcagaggaaaggagaaaatcctatg

SEQ ID NO: 170 - DNA, 1278 bp, Unknown
  Ga0075125_10001675 JGI
atggaaacaaaaataaactacgagaaaggaactgaaaaaacaccaacagacgcttcactaatctgttgctctgtaagagaacccattaactctacgagtttagaaaacaagagaaacactcttgataactctaagttcttttttctttgtggaagtgagtataactttccgaataggaaagcggtttgtagccgagtgtttgtattaggggttgatgggaaaccattaactccttgtaaacataaaagagcaaggttgttaatgaaacaaaataaagcaaaacctgtatggaataagtttggagaatttggaattaagatgttagaagaaacaggcagtgaaacagcagaaattattttagggatagataatggaacaaagtttgaaggttattctataattgttgataaaacaaataattttaatgtgatgtggaaacttccagataaacaaaaacttgtaaaaaaacttgaagaaagaagtagattaagaagagcgagaagacaaagaaattgcaggagaagagaagcaagatttaataatcgttcaaaagatggttttattgcaccaagtcaattacaggttgttcaaagtaggttgaaagcaataactgagttatttaaatcttacccaataagcaaggttgcatttgaagatgtgaagtttaatcaccgagataataggtgggggaagaatttttctacaattgaagtcggaaaaaatatgattaaagattttattaataataaaattggaaggaaaaatttaataaattttgaaggaatagaaacatataacttgagaaataaatataatttgaaaaagtcttcagataaatcaaaacagagtttttatagccattgtgtagatagttttattatatcaatggaaactattggaaaacctattattcttaatgaaagtataacttatatcgatgataactacagacctgttagaagaaggttacacgacactcaattttcaaaaggtggaattagaagtaaattttctactggaaaatttcaaggaatatcaaaggggtgtattataggagatgaaaatggttggttgggacaattggttggtggaactaaagataattgctggtattgtgattttgaaatgagaggtaatagaaaagtttatcaaaaaggaaaatccataaataaaattagttggatttcacatcacttcaaatataataaactaaatataaacagccaattcatcccccacctgaaggaaggggacttcttggctcagacaatatgttaa

SEQ ID NO: 171 - DNA, 324 bp, Unknown
  Ga0075125_10001675 JGI
taaaaagaatacgtgaaaaaagaaaaagaattaatgctaaagaaaaaagaagttctcaaaaaagaagtgtagaaattgttgagtatgaggatggaacatattctttgattgggtatgcttgggatcttaaacttaaagaaaaagaagtctctgatgctgttaaaaattggattaatggttctcttgaaaatggggaagaaggtgaactacccctccataaatgaaggggcttcttatgatggtaagaacgcaagagttcactacactaagtttgaggaaacaaagaaatggaaacaaaaataaactacgagaaaggaactgaaa

SEQ ID NO: 172 - DNA, 1230 bp, Unknown
  Ga0209347_1000563 JGI
atgacgcatgtctacgtactttccaggaacggccgccctctgatgccgaccatgccggccagagccagacacctgctcagagcaggcgaagcgagggtggtaaggatcaagccgttcaccatccagctaaccattaacacgccagaagtggcgcagccggtatacggcggccaggaccccggattaactcagggagtggccgcagtaaggaacgacggcaaagttttgtttaaagccgaagtcaaatgccgacctgacatttcagagagactcagggaacgcgggagttaccgcaaaggacgccggaaccggaaaacaaggtaccgccagcccaggtttttaaaccgcaaaaagccggaaggctgggtggccccgtcaatcaagcagttaaaacacgagcatgataaactccggcagttggtggaaagcatcctgcccgtgaccggctggttcatagaactcaacaaattcgactttcagaagatggaggacccgaacatccagggtgttcagtaccagaacggcccgcagaaaggctgcttcgacgtaagggaatacgtcctcgaacgcgacggctacgcctgtattctgtgcggcggcgtaaaaaaccgcaaactctatcactttcgcggcaaatccgagcgtccgaagaacctggtcaccctctgcggggaatgccacagaaaggccgtcaacaaagaaatcccttttgcggtattgctggagagctaccgttgggcagccagggtcaacgtgatgcgtgcgctgtgggggccgtccggacaaatcaattttgtcacagcagagcaggcagccgcgtcccgggaactgctccgcatggctaaaacgcacagcaacgacgccttggccgcagttcatgcggcttatggaacagtacccgccgccggcgaatgcaccctgcacggccgctacgtccggcagaagaaccggcaactgcaccgggcgaatcccggtaaaggcggcgtaaggcagttggctaacgccaaccggtacctggtaagcaaggcgggagtgagggtgcaaaaatacgacctggtaatataccgtacccggagtggccggaaaatcaccgggtacgtcaacaccctgttcagccgcggcgcggcgcggatagctgattacgccggcagggaactgtacagcggagcgagtgtcaacaaactcaagaagctgcagaatgctgataatttggtatgggaggtgttataa

SEQ ID NO: 173 - DNA, 262 bp, Unknown
  Ga0209347_1000563 JGI
gtcaaccaccccccccactgaagtgggaggcttgcagaaaacactgcgagcctcgggttgactagccccagcctgtcagttacatgccagactacgttggaaaggccatcacaccctggagcgtagcccgaactccaggctctgtggtccgggattaaaagccctgcggggcaggggcggtgttccggacataacaaacccttccaacatgggcgacgggcgcaataacttcaacgtggaggaggtcatctaaatgacgcat

SEQ ID NO: 174 - DNA, 1254 bp, Unknown
  Ga0209941_1000055 JGI
atgacggtatttgtcttggacaaacgtaaacggccgctgatgccgtgtagtaacaaacgagctcgtttactgttagagcgtgggcgcgctgttgtccaccgctttaagccctttaccattcggctgaaagaccgtattcagggcgactgcgtatttcaacctatcatgctgggtatagacccgggttcaaagaccacgggtctagccctcacacgccgtgacggtgaggacgccgtactggtgtttggtgttgagttacagcaccgggggttggctatacgggccaagcttttaaggcgcagtgcttaccgccgtaatcggcgctcccgtaagacccgctatcgccctgcccgttttaaaaaccgtacgaaaccaaaagggtggttacccccctctcttcgacatcgagtagaatcaacgttgacatgggcgggtcgctttcgacgcttagcaccagtgaccgctttggcttatgaagctgtggaattcgacacacagcgtttacgtaatcctgaggtctctggcatacagtaccagcaaggcacgttgcaagggtataccgtccgtgcctacgtacttcagaagtgggattacgcctgtgcgtactgtggatccaaagaccgtctgacacttgatcacgttatccctcgctctcgacacgggagtgacgcggtgacaaacctggtctgtgcttgttacggctgtaatcaacgtaagggcaaccgtcgggtgcaagagtttttagcaaagaaacccacggtactaaaacgtgtcctcgaacaactgaaaaagcccttacgagacgctagtgcggtgattagtacgcgccccgcgttacataaggcgttaggggaggtaggattgccactcactgttggtactggggcggaaaccagctacattagacaccgattgaaactccctaagagtcatgtcgtggacgctgcttgtgtggcgctaacaggaacccttaaaggagaatggtttaaaccattacttgtcgtttgtgctggtacgggacgttaccaacgtgtcagaacagatcgcttcggatttcctaaagcgcacagagttcgcgtcaaacggccattcggatttcaaacaggtgacctggtgcgttatgggaaagttattggtaggacagctgtaagaatgacgggttttttcagtttccaacacaaacatcaaaactttaacgtaaaatggtcgaaactaacactggtgcagagaagtgacggctatctctattgttga

SEQ ID NO: 175 - DNA, 289 bp, Unknown
  Ga0209941_1000055 JGI
gtcagcggctgcgatcaagttcaggtacgctgactttcccgaacctagtttcgtcagggaaccagactcaatctgacgtaaagtcagactacgttactcaagaaataggtatcttcagatacctcctcagtctgaagctctacggtattacgttaaacagctttatgggtttaaggcagtgcgtaatgcgtcaaaccttgggataactttgtcgagaggactgtggggtaacgccccactgtcactgaaggcccgtaagggcgttgtaaaggtatttcaccatgacggt

SEQ ID NO: 176 - DNA, 1329 bp, Unknown
  Ga0208186_100002 JGI
atgcttgtctacgtattagataaagatggaaacccgttgatgccaacacgccgtttaggacgtgttcgtcattggcttaaagatggtgaagcaatcgttgtttcgcatcaaccatttaccattcaatttacaaaaacaactgaacgtcatactcaagacttaaatcttggtattgacgctggttataaacacattggtgtttctgtgctaaacacgtctaaaaatgaagagatctactcagaatctgtcgatcaacgtgcaaacgaggttaaaaagaatattgaccgtcgtatgtatcgtagaactagacgtaataaactacgtcaccgtaaaccccgttttgataatcgtaaacaatttaaaaagtctgaaggctttacgccttcaatttatcacaagttccaagaacatttgaaagcaattggccgtgttaagaaattcttacctgtgtctaacatccatattgaagttgctccatttgataaccaaatgattaaagctaaatttaataacgaagctgttaaacgtcaaaatggcgatatgcaaagacattctgacattaagtcttatatctttgaacgcgacaactacacatgtgcagtctgcaatattaaaaagcaagtgtcacaattacattgtcatcacgtcaaatttaaatccaaaggcggaacgaaccaacctgataatttacttacagtatgtactaactgtcatacacctgacaatcatcaaaagggtcacgtactctatcaaatgatgcaagcaaaacaaaacccattttatcaaggggcgttcttcatgtcagcactcaagattttattagaaaagcaccttacatttcaacaagcctttggttatgaaacctctgctaaacgtattagctttggctggaataaagaccatcacgttgacgcattagtcattgccggcgcaaataatgacaccaaaccatattctgttcatattaaccgtacaaaactacaacgaaataatcgaagtttgtctaagttctatgatgcgaaatggttagactctcgtgaccacaatgtcaaatccggcaaagaattgtctaatggacgcgtaaaccgtaatcacaccaataattctgaaaatgagcacgtttaccgttgtcagaaaattaaaacaggacgtatctctacacgaaaacaacattatcaaattcgaccacatgatattctaaatattggtattgttaaaggtgtacaaaatcttggtaaatacctcaagctaaacagtggaaaagtggtttctactaaaaccgttagagtacttcgtcatgtaaacgggtatctagtagaaactaactaa

SEQ ID NO: 177 - DNA, 326 bp, Unknown
  Ga0208186_100002 JGI
gtcaatgactcccgactaaagtcggaagcttgccaaagcacttttaattagaaaagtgtctttacaggcttaattgattagactcggtgaagagaatcttacgattctctgaactccgttagctaagaatacataggcacgtttggatactactcacgtctgaaccactgcgtgttataattaaacatccctaagagtaaggggaagtgttataacaatcaaaccttagcataacattgtcaaagagtacgaacaggaagcaagcttcctgaattatctttaattagatacaaacaacactattagaaaggacatgtcacatgctt

SEQ ID NO: 178 - DNA, 1356 bp, Unknown
  Ga0315284_10000153 JGI
atgcagaagattaatataaggctaaagaattcaccagagaatacttctctagttctctgctctgagagttcttgtctaaacaaagaagaaattcttagtgataagagcatacagccagtattaatcaatcccgaagagaatcaagtccaacaagtaggacgctcaatacaagcacttgtacttgtcctttcaaaggaaggtaaacctttgatgccttgttcttatgctaagagcaaacgtatggtaaaatcgggtaaggctacagtaattaaaagatttccgtttgttatccagcttaattttagctgtgaagaaaagacacaagagattatttttagtttagatacaggctacgaatatgcaggtgtatcagtaagaacggaaaagagagaaatagtaagaattgaagtaaaattaagaaccgatgtaagtgacaagattgaagaaagagctatgtatcgaagaaatagaagaaacagattatggtacagagaaccaagattcgacaacagaaaaggattcatatttgctccatcagtacagcataagattgattctcatatagggattcttgataagatttctaaatatgttcctgtatcaagagtttgtgtggaatcgggaaagtttgatattcagaaaattttaaatccggaaatatcgggaaaagaatatcaacaaggaattctttatggttatgaaaatgtaaaggcttatgtgacaacaagagaacatggaaaatgccagctatgcggcaaggaatcaagtaaaggtaatggttttagattgcatcatataattccaaaacctaaaggaactgataaacctgataatttagctcttttacatgagaaatgtcatgaaagactacataaaaagaacttgcatcatcttttgacaaaaaataagcaatacaaagatgcaacaatgatgaatataatcaggaaagaagtagtccgaagaacacaggaattgtatccaacagcagtaacttatggatatgaaactaaagtaaaaagaaacgaactaaaccttgaaaaatctcatactaatgatgcttttgtaataggtaacggaacagttcaagaaagatgtaaagaagtaaggtggacacaaaaaagaagaaataatagagccttacagttaaacaggataggttttaagccttccataagaaaacaaaaatacaaggttcaaaataaggatttgatttatatagatggtcaaccattcgtttctaaaggatgtcagaatttaggaacaagagttgcttataatgattatcagggaaagaacagaactgtcagaatagaaaacatagataggttttataattacggaggtttttatgtatga

SEQ ID NO: 179 - DNA, 267 bp, Unknown
  Ga0315284_10000153 JGI
gtcaactaccccttggctaaagaccaaggggcttgtacggtgacgtacaacgatgaaaagagttgattagggagcttaggaaactatgcagaagattaatataaggctaaagaattcaccagagaatacttctctagttctctgctctgagagttcttgtctaaacaaagaagaaattcttagtgataagagcatacagccagtattaatcaatcccgaagagaatcaagtccaacaagtaggacgctcaatacaagcacttgtact

SEQ ID NO: 180 - DNA, 573 bp, Nocardiopsis sp. JB363
atggctacgttccgcacaggacagaagacccaccaggccgtgcttcctcagcggcctgctctggaaccggagtcggtggacacgccccggatcgggcacgaaacgggactccgacaccaccccagggtggtatccggtgcggaccatgtgcgaggggagaccacccacatcccacctgatgtcggtggcgtcaccacccagcctctggctggggagaggccgcgtgagcggcacccatccgtcttcgtcctggacaagaaccaggtcccccttcagccctgtcacccggccaccgatacaccgctgaacctggcccacgtccatccccgctcccgtagcgggctggaacaacgaccgcccactcatgtcggttcgggtcgtcggaccaggtggaaccggacccgcgaccacctaccgaaaacccacaccctggacgccctggccgtgggcaaggtcgacaccaccacccacggcaccgtccaaggcatcggacacaagtacatgcgtctgctccaaagagcggacggctacggctacacctggaagggagagggcgtttcctcccggctctga

SEQ ID NO: 181 - DNA, 298 bp, Nocardiopsis sp. JB363
gtgaagggatcccggccctgttggaccgggctttcagtccttagggttgagagccgtctttaccagcaccagccatcgcctatgaggaggtgacctcgatggctacgttccgcacaggacagaagacccaccaggccgtgcttcctcagcggcctgctctggaaccggagtcggtggacacgccccggatcgggcacgaaacgggactccgacaccaccccagggtggtatccggtgcggaccatgtgcgaggggagaccacccacatcccacctgatgtcggtggcgtcaccaccca

SEQ ID NO: 182 - DNA, 1368 bp, Wastewater metagenome
atgtcaaatagagttttggtgctagacactaaccgcgtaccacttatgccgtgccatccggcacgagcgcgggagttactaaacggtggtaaggctgcggtataccgcagatatccattcacgattatcctgaagaaccgtgaaggaggcgatgtacagcacatcgatatcaaaatagatccaggtacgaagtacaccggcatggcgctggtagcactcttcgatagaggaccacgctgtgtatacggtctgcacatcaaacaccgtggtgacgtggtccgacagtcgatgactcagcgagcagcgtctagacgcacacgtagatctcgtaaattacgttacaggcaacctagatttaataatcgtactcgtccaccagggtgggtaccaccctcgatcgaatcgcgggtgtctaacgtgacgacgtgggttagacgactattcggtgtaacacccgctgacaaggtctacttcgaagtggtcaaattcgacacgaacgccatggcgaacgtaacacgcgatcagtatgacacagacgctcgtatccgtactcagatgcgtcactatttactgacaactcgtggtaatgtatgttcgtactgtaagggagtctccgcagataaccggttagaacgcgaacatgtaatacctcgatctagaggtggtacagatgcactcgccaatgctgaactcgcgtgtagacggtgtaatctagacaaaggaacgatgttattgagcgagtggttgaatgcactaaaaggacgtatagatcctctctcgatggcacggttaaaacatatccctaaatgtattcgtcgtatcagacattcgttacgtgacgccagtatcatgaactggacacgctacatcatcgtggaacgcatacgtgatctagggatcgaggtcgtggagtgtccagcgtgggagaccgcgtaccatcgtcatgtcggacagtacgtgaagacccactgggtcgacgcagcgtgcatagggtacgtaccgtacctggatgatcagtctacgatctacaccgcagtcgcatcaggatatggtaatcgccagatgatcaaatccgacaagtatgggttccctaggggacgtcctaaaggaccctcctcaaataatgggtttcgtagtggagatatgtgtaaactaaaccaacccggtggtaaatataaagggacatatgtgggaaaagtaacgatacgcacaacgggttattttgatataaaggtcctaaactctaaaatcgcttctaaatatacaaactatgtaaagttacatcatcgggatggatatgtgtatactacaggtacaggtatcctgtctataacaatcaaaatgaatttgatcacagtatctatctag

SEQ ID NO: 183 - DNA, 258 bp, Wastewater metagenome
gatgttaacgttcaaagttactagtgccctttattagcttataactaaatagtaaccagatctagctaccgtgaggtagctacgttacttaggaatacataggtaccgtgggatggccgtgccagtcccacgctctacgctgtgcagttaaacagacatgtgggtaacgtgtcggtgctgtacagatataaaaccctaggataacatgatcgaggcgcacgttactgtacgatctcgtgtcgtacaaggagataatgt

SEQ ID NO: 184 - DNA, 1290 bp, Unknown
  Ga0371488_0019773 JGI
atgaacaacgtccccgaccgcgtcttcgtcctctacgacaacaaatcaccggctatgccatgcttccgcggccgcgcatggcacctgctcaaagccggacgcgccgcagtctaccggctcgtgccgtttaccatcatcctcaaagatcgcacctcgggcgacgcacagcctgtcgaacttcgcctcgacccgggctcgaaaacctccggaatcgccgtggtcgctaacgacaccgtcgtcttcgccgccaacctgcaacaccgcggccaggccgtcaaaaaggcgctcgagcagcggcgcgccctccgccgcggccggcgagcacgcaagactcgctaccgagcaccgcgcttcgataaccgcacccgcccggaaaactggctcccgccaagtctgctctcccgcgtcgacaacgtcgtctcgtgggcacgacgactcgcacacctcgcgccactgacctctatcgccgtcgaaaccgtccggttcgatacgcagcagatgcagaacccggaaatctccggcgtcgcgtaccagcaaggcaccctcgccggctacgaaatgcgcgaatacctcctcgaaaaatggaaccgcacctgcgcctactgcggagccaagaacgtcccgctgcaaatcgaacacatccaagcacgcgccaacggcggctccgaccgcgtcgcgaatctcacgctcgcctgcgagccctgcaacgtacgcaagggcacgcacgacgtcgccgtgttcctagcccggaagccgaacgtcctgaagaagttgctcgcacaagcgaaagcgccgctcaaagacgcagcggcggtgaacagcacgcgcaaagaaatcgggcgacgactcgtcgcactcggcttgccgacgagcttctgggccggcgggcgtaccaagatgaaccgcgtcgcacagggctatcacaaagaccactggatcgacgccgcctgcgtgggcgaaaacggcgctcacgtgcggatcgcaacgacgatcgcgcctcttggaatcaaggcactcggccgcggatcgcgactcctatgccgaccggacagatacggattcccgcgactcgccgccaagagcgtcaaacgcatagccggcttccaaacaggcgatctcgtccgactcgctcagccgagcggaaagtacgccggaacgcacatcggcaccgtcgccgtgcgcgcgcgaggcgacttcgacctcagaaccgccggcgcaatcatcaccagcgccggccgaaactttacgctcctccagcgaaccaacggatacgcctatgccgcagcctga

SEQ ID NO: 185 - DNA, 343 bp, Unknown
  Ga0371488_0019773 JGI
tccaatacggtcccgtagctcagttgttgattcggcgcttcacggcttccgtgccgtgaagcaaagttgtcaggccacaacgcctagcaacgtcgacaaccagcctcagaaaggataatcatccgatctacgatcttcgagaatgatataggcaccgtcgaatgcttctccagttcgacgccctgcggtgcacgacgacacgagcatggaccgaaacaacaggctcacgtcgcgtacgaaaacctcgacgatcattggcgaggagaccgtcccccgcaaagggggtagcccggcgtaagccggatccgcgaaaagaacccaaatgaacaacgtccccgaccgc

SEQ ID NO: 186 - DNA, 1356 bp, Unknown
  Ga0302192_10002069 | JGI
gtgctttgtcgagaggagcagacggttcaagccgtctcgttacccaaggagcaatccttggagactaatccggtaacggattcggaaaccaagggcaaggagaaccccaaagttttcgtgatcggtaaaagaaaatctcctctcatgccctgtcatccagccagagcaagagaacttctaaccaaggtcaagggaatcgcaatcctgcgattccccttcgttctacggttaaaaaaccgcaccgctggatccacacaaaccatagaaatcaaactcgacccaggcgctaaagcttctgggttagcactggtcaccaataaagcaataattctcctagtagagatcctgcacagagctcaggaaatcaagaaagccctccttcaaagaaagggttatcgccgtaggcgtagaacctccaaccttcggagcaggccagcacgctggctcaatcaacggagaaaagaaggctggttacctccatcccttcgctccatcatcaacaatctcattaactgggtaaaacgcttcgcacgatgggctcccttaacgggaatcaccattgaacgtatcaaatttgatatccagaaactggagaacccagaaatcagcggagctgaataccaaaagggcactctcctcggctgggaaatctgggaatacttactcgaaaaatttgatcataaatgtgtctattgcaacggagcaagtaacgaccccaagctgacaaaagatcacgtcattgctaccacaaatggcggtagcaatagagtcagcaacctcgtagttgcctgctacacctgcaaccaagaaaagggagacactcccattgaaagctatttggcaggaaatccccagctcctcggcgggatactcagtatcctcaaaaaacccttacaaggagcagccaaaatgaactccatcagaaattctctagttcgtgaaatgaaaactttcggactaccgcttactttaagctcaggagcagaaaccaaatacaatagggagaaacatagaatccctaaatcccacgctctggatgcagccttcaccggaacggtgcagaccgcaaagaactggagacaacctacttttaccatcacagctcaaggccgtggaaaacatcaacgcaccaaacctgacaggtttggattcccgcgtctcctccttccccgtaagaaaatcttttacggattcaaaacaggcaacatcgtccaaaccccattcggggtaggaagaatcgccgtccgatcaactggttactttgccttaaacggcaaagtaaccatcaaacacacacaatgctgcctgctccaaagagcagacggctacaactatacgctctcatctccggcctaa

SEQ ID NO: 187 - DNA, 284 bp, Unknown
  Ga0302192_10002069 | JGI
gtcaaccacctctccctaaaggaagaggcttgaccagactaagccactgaaacgtgactacgcacactaacaaaaaacaccaagggatacctaagggacaacgcgaaagcgttgccacctggcctcagtcccttgctctgtcatcttaccccgaaaggggcaaggatgttcttgtgctttgtcgagaggagcagacggttcaagccgtctcgttacccaaggagcaatccttggagactaatccggtaacggattcggaaaccaagggcaaggagaaccccaaa

SEQ ID NO: 188 - DNA, 1236 bp, Unknown
  Ga0376455_0025877 JGI
atgccttgcacacaaagaaaagcgagaatccttttaagggatggaaaagcaaaaatatataagtatcacccatttactattcagctgacctatgcaacaggagaaacaaaacaggagtgtagcataggggtagatactggtagtagacatatcggtttagctatcacatcagaaaataaagtattcttcaaaggtgaagtagaacttagacaagatgtaaagtctaatctggacacgagaagaatgtatcgtagagatagaagaaaccgtaaaacaagatatcgaaagcctagatttttaaacagaaaacaacaggagaattggttgcctcctagtttacaaaatagaatcaatcatacctatcattggatagatgtattacaaagtctaatacccactccagatttacatattgaggtggggaagtttgacacagcaaaaatgataaacccagatattaatggggtagactaccaacatggtaagacttatggattttacgatgaaagatattatgtatttgcgagggataactatacttgtcaggtatgtaagaaatcggttggtaaaatcttacaaacgcaccatattctttataaaagttgtggtggaacagatagggtagataatcttatcactgtatgtacagattgtcacacatcagcaaaccataaagaagggggcatcctctataaatggatgttacagcataaaaaagtaaatcaatataaagaaccaccttttatgaatatacttcgtagaagaatttttgagaggtattcaaatgcagtgattacttatggttcagagactacaccaaagcgtaaggctatggggttagaaaaaacgcattataatgatgctatcattataagtggaatcaggaatattatggagaacccagatgagtggttgttcatcaaacagtttcgtaagaagaaacgctctttgcatgaagccacagctcgtaaaggaagaaaagtaccgaatcgcaatcagaaacgtaattctaaaaatacacctttttataaagggttttatttgaatgataaagtacgtgtatttgggcgagaggggtatatcacaggttttacaggtggtggtgcttatgtaaaagatgaggatggtaaatatattacgataccaaataagacgtataaacaagtaagtatgagtaagctatcttttttatgccacaataataattggcagtatattagaaagatggctatgtaa

SEQ ID NO: 189 - DNA, 277 bp, Unknown
  Ga0376455_0025877 JGI
gtcaacaacccaccacttgaagaagtgggggcttgcaaaaagccatgttgactagcctaagtttttttagaaactacgttgtagatgttatcataccctagaatgatttcctagttctaggctctatgtaggctctgtaaaagttctgttgggtaggaacggtcaacctagagtggtcgattacgacaagcatttataacattggcgaagggaaacaaactttctttatagaaaggtgtggaacttgagagtatccacaaaggtaaaaattatgaga

SEQ ID NO: 190 - DNA, 1167 bp, Unknown
  GENOME_ACESSION: mgm4743569.3 MG-RAST
  MISC_FEATURE (4)..(39): Any "n" represents any nucleotide
  MISC_FEATURE (456)..(538): Any "n" represents any nucleotide
  MISC_FEATURE (791)..(882): Any "n" represents any nucleotide
atgnnnnnnnnnnnnnnnnnnnnnnnnnnnnnnnnnnnnaagaagcacgaattattatcagcagaagcagaactgcgcaccgacatttccaacaacatcacacagcgcaggacactgcgccattcacgcaggaacaggaagacgagataccgcaagccgagattccagaaccgtgtccacgcaaagaataaaggatggctcgcaccttccgtacaggcaaagtgcgacgcacatgtggataccgtgaaaaaggcgattgatatccttccggtatcagagatcacgattgagatggcacctttcgatacacagatgctgaaagccgagatggcaggccagccgcttccatccggtgaaaactaccagcacggagaatcagaaggttatgacaacatcaaggcttacgtgaaatggcgcgacggttatgaatgccgcatctgcggggccgagcatgtnnnnnnnnnnnnnnnnnnnnnnnnnnnnnnnnnnnnnnnnnnnnnnnnnnnnnnnnnnnnnnnnnnnnnnnnnnnnnnnnnnntgatcaccgtctgcccggactgccacaaagcgtatcatgaaggcaggctgcatgggaaaaacgcggaactgatggaacccggaccggaagtaaagccaatgcgtgatgccgtattcatggggatcatgcgctgggcggtatggaacaggctgaaacagttcggccttccgctacatatgaccttcggctatatcacagcgaaacagcgcgagaagtacgggcttgaaaagtcacatcgtaacgacgccagatnnnnnnnnnnnnnnnnnnnnnnnnnnnnnnnnnnnnnnnnnnnnnnnnnnnnnnnnnnnnnnnnnnnnnnnnnnnnnnnnnnnnnnnnnnnntacgtgaagaaagtacgctgccataacaggcaaatccacaagctgacgatccagcctggaggggagagaaaacggaatcagtgcgcatacgaggtaaaaggattccgcctgtttgacgaggtacgctttgccggacaggaatgttttatcttcggcagacggacgacaggatattttgacctgcggaaagcggatggcacaaaagtctatccctgtgccagctataagaaactggagctgattcacaaagcttcgtatgtattagtagaaaggaggtccgcctaa

SEQ ID NO: 191 - DNA, 329 bp, Unknown
  GENOME_ACESSION: mgm4743569.3 MG-RAST
gtcaataacccgcggtcaaaaccgcaggcttgaaaaagcttattgactagcctaagcgcagcgacggcctcatgccagagagtctaaccgctagtgctccgttaattcagttatcacaccccggggtgttatacctggctccgcggctctgtgcaggctctgtaaacagtcctgagagggtaagggacagtcaacctggtccgtgcgcttggcgcacaagctgttttaacattggcgaaggtatccaactggccggaacattcagtacacaaggaacaatgcgaagggtaagtattaccggatttggttccggagaaaggcaactgatg

SEQ ID NO: 192 - DNA, 1359 bp, Unknown
  Ga0265294_10008100 JGI
atgccgacaaatccggcaaatgccagaattttgctcaagcagggcaaggcaaaggtgattcaaagaacaccctttgcaattcacttgctttatgagaccaccgagcatattcagccgataaccgttgggcttgatgacggagggatcaatatcgggattgcagcggtttcaaacggcaaggttttatttcaacaggaagttgttttacgttcggacgtcaagtcaaaactggatacccggaggcaataccgtaaatccagaagaaaccgcaaaacaaggtatcgaaagtcaagatttctgaacagaaagtcatccattcccacatgcaaggtgtgtggcgggaatgccccggcatctcaggtgatctgtcgatcctgtctgaacagagcggatggggttcatcagaaatatgcgaagatcaaaaaaagtgttttccgaatcccaccatcaatcaaggcaaaaaaagatgcgattatccgggtggtcaagcagatcccactgcccatttcccgaattgtgctggaagatctctatttcgatttccaggcaatggagaatccggacatttccggtgagcagtatcagcatggagatctgctttatcacaagaatttcaaacagtcgtgcctggtgcgtgacaagttcagatgccgtgtttgcggtgcgcaaacaaaactgcaatgccatcatatccgtcaaagggcaaagggcgggacagacaagctctcaaatctgatgacgctttgtgatctctgccatgatcgacatcataaagaagggctcaaacttccgaaacaaaagagttccttctacatgtcggcagcacatgtccagcaggggaagcactatctgcaagctaagttgtcacgaatcgcgccattacggacgacattcgggtatatcaccagtcattttcggaacaatgccgggatagaaaaatcccatgtcaatgatgctgttatcattgcagataaacaggcaactcctctggaccggcagatacagacaaaacatgtgcagtcacggaaaagaagtttgcatgaagcaattgcaagaaaaggaaggaaaaccccgaaccgaacccagaaacggaataacaaaaacgtatttaccctgagaggttttaaccggtgggatacagtgcagtacaagggacgtgtcggttttatctccggttttacaggcagttcatcctgccggatcatcgatattcatggggaatatatcaaaaatccggaaaaaaaatatacgcaggtcaacctgcgggaagtgagaaaaatacatgggaacagatcaaccgtcagttactgcgccaattcctcccccaccttcgctgtcgctcaggaaggggactccttg

SEQ ID NO: 193 - DNA, 263 bp, Unknown
  Ga0265294_10008100 JGI
gtcaactacccctcctgaatcaaagattcagaaggggcttgtaaaagcccaagttgactagcctcagtctctttattagggactacgttcggcaggatgtagatacctttggatgtaatcgccagtccgaagctctgtcgtggctctgtaaaagctctgtgaggaaggagcggtcaaccacgttgtgaagcctgctgaacattggcgaggcgaaccttacccctctttggagggtgtgcataactgaaaggttttttttgaaa

SEQ ID NO: 194 - DNA, 1020 bp, Unknown
  Ga0104756_1007894 JGI
atggttccagtagtcaataaaaatgggcagcctttgatgccaacgactccggcgagagccaagagatggttggcatccaaaaaggctacctatttttggaagaaaggagttttctgtgttcggttgaacgatgatccatcgagtacttttacccaacagatcgcttgtggcgtcgatcccggctcgaaatgggaagggatgaccttgaaatccagggctcatactattctcaatacacagaacgacgctactacttgggtcaaagatgccgtcgaaattagaagaaatatgcgtcgaagccgacgttttcgaaagactccttgtcgaaagaataggagtaatcgcagtagcctaagtaagaagggaagactaccgccttctacccgagccagatgggaaactaagttacgtttaatccatagctggcgaaaggtcttcccgataagtgactatgtagtcgaagatatcgctgcggctacccaaccaagaaaacgacgttggaattcatcttttagcccgttagaagttggaaagaactggttctatgatgaacttcggaaactcggtaatttagttaccaaagctggctgggaaactaagaatctgcgggatgctttgggattagtaaaatctaagaataatccagatgcgtttgaagctcactgtgtcgattcttgggttttagctaattctgttgtcggaggacaccaagctcccgagaataaaaaaatcttattcctcagccctcttcgattccatcgtcggcaattacatcgcttccagccgactaaggaagtcggtcgattagcctacggtggaacgatgagcttaggattgaaaaaaggcagtttagtagaacatcctacttacggtcgatgctacattggtggtaataccaaaggacgtttaagtctgcattctctggaaaccggtggacgcttaacccagacagctaaggttgaagagtgtcaattccttagctataatagctggcgttggcgggtttcctcctccccctaa

SEQ ID NO: 195 - DNA, 296 bp, Unknown
  Ga0104756_1007894 jgi
gtcaactacccccacctaaaggtgggggcttgtgaccaacgcagaacgttgccactttgcaaaggtcacgaggtattctctggtaacagagggtatcaggagactagcctggccaagatcaaaggtcgaaagatcgatggtcgtttgaaggcaattgaaccatctaaccgtggcaggttggaatatgctggcgatgcttcccaagttgctagcctctatgatggtcaatggcgaagggaaaaattaacctcagtttcattgaaagctgaggacttacccgcaagggtgcgttgaag

SEQ ID NO: 196 - DNA, 393 bp, Unknown
  Ga0394872_0157437 JGI
atgtccaaaatctttgtaattgatacaaacaaacaaccattaaaccccatccacccagcacaagcgaggcaactattaagaaacaaaaaagcagccgtctttagacgttttccttttactttgattcttaaagaatcaaccccagattcatctatatctcctctgagattgaaaattgaccctggtgcaaagttcactggaatcgccttagtcaacgattctactggcgaggttgtcttttctgggaaaaaagttgggacatatattgggcgtgtagctgtaagatcttcaggaagctttaatgtttcaactaagaatggactggttcagggaatcagtcacaaatattgtactcatattcaccaaaaggatggttattcctatgtgtattag

SEQ ID NO: 197 - DNA, 244 bp, Unknown
  Ga0394872_0157437 JGI
atcaacaacccaccgataaatcgggggcttgaaagagcctaagttgaccagactaagacctcaaaggtctacgtttaaggtaagagttaaagacctaccagggaatgcgtagctagttccttgctctagaaccaaaagattaaacaggcttaaagggttaaaccagtgtcttttggatagttaccgaccttaaacattgtcgaagctaacattacccaagcaattggagggacttatgtccaaa

SEQ ID NO: 198 - DNA, 1302 bp, Unknown
  Ga0376456_0000023 JGI
atgcgagtatttgtagtaagccaaagaaataaacctctgatgccatgtacacagagaaaggcaaggttattattaaaggaaggcaaagccaagatatataaatacaatccatttaccatcaaattaaaatatgcaaccggtgaatcactgcagccttgtcatattggaattgataccgggtttaaacatattggacttgcagtaaccagtaatgataaagttcttttcaaagggaaagtcgaattaagagaatatggagaacctcagaaagatgcaaacggtcataatgcttttatgacatgtgttggaaaaagaaaaatgatgaggcgaagtagacgtaatagaaaaacacgttacagggcacctcgttttcgtaatagaaaaaagccggatggttggctgccaccgacaacgcaggcaaagcttaattctaatttcaaatggatagatttattagctgagcttgtacctaatcctattcttcacatagaaatagctaagtttgatgtacagaagatgatggatccagatattgaaggtgtcggttatcagaacggacagactaaaggcttttgggatgtacgatattttgtgtttgcaagagataattatacatgccaggtttgtgaaggaaagtctaaggacagtattttaaggactcaccatatcgtgtataaaagcatgggtggaacggacagagctgataacttaattactatttgtaactcttgtcataccggtaagaattataagccaggtggaatcctttacgattggtgtcaaaatgaattcaaaataaatacatataaggaaccaccttttatgaatataatcagcagcagaataagaaacagatatccggctgcttatatgacttatggatcagtaaccaggtctaaacgtacagagttaaaacttgaaaaaacgcattacaatgatgctatagcaataagtggtattgaagatattaaagaaaatcctaatgatctgttttatgtaaagcagattagaaagaaaagccgacagttgcattatatgcagccatataaaggacataatccaaatcagacaagacgtagtgctaatatactaaatgtaaaaggtatatataaaggtgataaagttcaatatagaaataaatatggatatgtaaccggatttacgcactcaagtgcatatgtaaatgataaaaatggaaggctgcctattccggaaaataaaactcaaggtgtaatatcaataagtaagcttaaattagtatgtcataacgcaaactggatgtacttcacaaccactgtataa

SEQ ID NO: 199 - DNA, 342 bp, Unknown
  Ga0376456_0000023 JGI
acctcaaatgtgaacacctacaaaaatgtgtgtacctcattctagcctaagtcttaactgactacgttaattatgttatcacacctacggatggttccctagtccgtagcatctgtgcaggctctgtaaaagcttcacgagtcttagattggaagcagtcaacctggagtgtccgatatcggcaagcatttttaacattggcgaagggaaaatgccttatggcatgacaactaactacagatgattctgtagttaggtatggcacttgagagtagccataaaacattaaagggtatgttacagtacccttttactttttagaaaggagcttttaggatgcga

SEQ ID NO: 200 - DNA, 1338 bp, Unknown
  Ga0370511_0001040 JGI
atgcaaagagtattagtacttagtaataacaggaatcaacttatgccgtgctcttcagcgagagcgcggatgctgttgcggaacaagaaggccgcggtcttacggaagtatcccttcacgatcatcctcaaggaccgagaggaaggcgctatacagtctatcgagttcaaagcagatcccggcagcaaagtcacaggcatcgctctcgttgccgatttcgcaacgagaggtaagacagtagtctttgccactgagcttcatcacagagggcatgcgatcaaagagtctctggattccagatgtgcggtccgcagaagccgcagaaacaggaagacaaggtatcgtgctccacggtttgataaccgaacaagaccctccggatggctgccgccatctctaatgtcccgagcctacaacgttcagaccttagcactgagacttcagcggttttctcccctttcttctattgcggtcgagaccgtccgtttcgacatgcagaagatgaccaaccccgagatatccggcatcgagtatcagcagggcacactccaaggctacgaagtcagagagtatctgcttgagacgtggaacagacaatgtgcttactgtggcaagagggatattcctttgcagattgagcacattgttccgcgcagccgaggtggaactgaccgggtgtcaaacctcacattatcgtgtgagacatgcaacacgaagaagggaacgaagactgccgccgagttcgggttccccgatatccagaagcaggcattgcgaccgcttaaggatgctgcagcagtcaacgcgactcgttatgccattggggatacgctcaagactcttggactgccagtatcgttctggtccggtggacggacaaagttcaatcgcacccagcaaggctatccgaagtctcattggatcgacgcggcctgcgtcggagaatctggctccaatgtccatctcgatcctaatatgttactgcttacagttaaagcttgcggtcatggatccaggcaaatgtgccgaatggacaagttcgggttccctcgtacttcagccaaagcgtctcgtgtcgtccaaggtttccgaaccggagatattgtaaagacgattattccgtctggcaagaaagtgggcaaccatttcggtaaagtcgctattcgcacttcggggagctttaatatttcaactagcgccggcgttgttcagggcatcagtcacaaatactgctcagtagtgcatgctgctgacggatattcgtatccccggccaataaagggaggctctcctctcagcaataaattaccgcgtatccgcgcccaggaggtgttatga

SEQ ID NO: 201 - DNA, 267 bp, Unknown
  Ga0370511_0001040 JGI
gtcaacgactcgggattaagatcccgagcatgcgaagtcatgcatgctcaagttggccaggctcagtcctaatgtttaggactacgttaccggcgaatacataggcaccttgggatgcacgccagtcccaggctctgcggcagacagttaaacaggtctaagagttaagccagtattgtttgcatataaaaccgtcggataacattgccgaggcacacattacccgcgcaagcggagaacgatggagtaatcgtcaatatgcaaaga

SEQ ID NO: 202 - DNA, 1296 bp, Unknown
  JGI25616J43925_10003507 JGI
atgtcgcgtgtgttcgtcgtggacgcgaagctgcgaccacttcagccttgcacgcctgctcgtgcgcgtctgctgctcaagcagcagaaggcagcggtcctgcgtcatactccctttatgctgatcttacaggaaacgcgaactgaggcagtcattgagccgttgcgtctcaaaatcgatccgggctccaaggtgacgggactggcactggtggacgatcagcgcggcgaactggtctgggcagcagaactgacccaccgcagcgagcagattcgggagcgactgcgcaaacgcagggccgtacgccgtgcccgacgcatgcggcacacccgctatcgacctgctcgctgggccaatcgacgacgaccgcgaggttggctggctccgtcgttgctcagccgtgtgcttcaggtgatgacctgggtccagcgactgaaacgctggtgtcccattggggcgatcagccaggaactggttcactttgatccacaggcattgcaagatccagaaatccacggtagtgcctatcagcgcggaccctttttcgggatggaggtccgtgaatatatcctggcaaaatggcagtatcggtgtgcatattgccagcgcgaacaggttccctttgaactggatcatatgctcccgaaaagtcgtgggggcagtgagcgtgtgagtaatctcgtgctcagttgccatgactgtaaccagaccaaagcagaccgaacagccgaagaatttggacatccagaggtcgcagcacaggcgcaaacgcctctcacggatgtggcagcggtcaatagtacgcggtggcgactctatcaggacctgtgtgccaccgggttgccagtcgaaacaggcagcggtggacggaccaaatggaacagacaacggcaaggactgccaaaaacccattggctggatgcagcggcggtgggagcctcgacgccagtacgattgcgggtaggccatctacgcagtctatcgatccgggcaaccgggtggcaacgaaggcagatgtgcctcatgactgaggcgggttttccacgaacccgtgcgaaacagcagagttgtgtcaagggcttcagaacgggagatacggtgcgagccgtggtcccgaaagggaagagagccggagtccatgtgggacgagtcgcagtgcgtgcgtcaggatatttcaatataaggacgcagagcggaaccgtcgaggggattcacgcgaagtattgccgcctgctccatcgcagagatggatacgagtatgggaaaggagatgcggcgtttcctcctgccccgtaa

SEQ ID NO: 203 - DNA, 300 bp, Unknown
  JGI25616J43925_10003507
gtcaggcacccaagccccctaaaagggggcgggcttgtacccctgcctgaccagtcccctgggtgcttgcattcaggagccgttcacacggagcgctcaaagacgcacctgtggctgaccgatccaggccacagccctgctagttggcggttaaacatgcctggtggacaaagcacgtgccgcaaacacatgccgcgtgtgaacacggacgaggatcactttacctgtctgggcgaccgggcagcgatccctcattagcgagggccccttccggggaaaggaggcttacgtatgtcgcgt

SEQ ID NO: 204 - DNA, 1314 bp, Unknown
  Ga0315295_10008866 JGI
ttgagagcgtttgttttagatatgcacaaaaaccccttgatgccttgtcatcaagcgagagcgcgaaaacttctcaagagtaaaaaagctaaagttttcagaatgtttccattcactatcattttgcaacaagaaacgactaatcaagttcaaaaagtagaaatcaaaatcgatccaggctcaaaaaccacaggagtcgctttagtttctaatcaaaaagtaatttgggcttgcaacctttcacatcgaggctcgctcatcaaaaaagcattactacaacgcagacaagtcagacgcagcagacgatttagaaagaccagatatagacaagcacgtttcctcaatcgcaaaagaatttccgaatggcttccaccatctttgatgtcgagagttgacaacgtttcgacctgggttcaaaaactaaattcactcgtcagattgacatcagcttgtatcgagacagttagatttgatacgcaaaagatgcagaaccctgaaatttcaggtatcgaatatcagcaaggtgagcttgttggatacgaagttagagaatacttgttagaaaagttcaatcgaaagtgtgtatactgtggcgcagagaacattcctttagaaatcgagcatcttcatcctcgaagcttgggcggttctgataaaattagtaatttagctttagcttgtcacaaatgtaatcaaaaaaagagcaatacacctttagaattgtttgttaaagacaagactaatctggcgaaaatcaaagctactgcaaaagctccactcgctgataccgctgccgtaaatgcaacaagatatgcaatcggcagagctgtaaaagaaatcattcttgatacctcgttttggtcaggtggtagaacgaaatgtaatcgaacaaaacaaaactaccaaaaagatcattggattgatgccgcgtgtgttggaacgactggtgaaaatatctggctcgatccaaacgataacattttgttagttcaagctgctggacggggcaaccgtcaaaaatgtttagtaaataagttcggattcccttgctcaaaaccgcgaacaatcaaacgagtttttgatttttctagtggtgatatctgccgtctcgataaatcgaagggcaaagatgccgggcggtatgtaggaaaaatttcggttcgtgtccgtggtgattttgacattcaagtgccaaaagaaaaaaacaagactgggaaagttggagcgaattggcaattcttcaagttagtgcagcgggctgatgggttcgcctatcaaatggcgggtacaaccgccagggctgcaacaacttag

SEQ ID NO: 205 - DNA, 279 bp, Unknown
  Ga0315295_10008866 JGI
acgaacttcctttgacttccctgtcaaagagtttcgcccgttgtgaccccagggacagccagactcaggcgaaagcctacgttagaggcgaatgtataggcacttcgaggtgcttctccagtctcgaaccctgcggctagtgattaaacagcaaaactccgggtgatgcagtgttgctagagagaaaccgcctcataacattgtcgaggagacctttaccagcgaaagctgagttcgctagcgtaagctagcacaaaagcgaggtgacaagctttgaga

SEQ ID NO: 206 - DNA, 693 bp, Unknown
  Ga0256845_1000645 JGI
atggtttttgtattaagcaaaaacagaacacctttagcccccacccgtgaggctaaagctagaattttattaaaagagggaaaggctgttgttcataaagtctatccttttactatacgactaaaggagaacagagagtgcattaaaagatatataattaaatttgatgttggagcatcagtcacaagtgtagctattgtagatgctctgaaatgttttttcttcgctgaaatagtgcatcgaggaaaagtcattaaaaaagcaatggattcaagaagagcaattagaacttatactctaaaagagttaaatctacccaaacaacactattatgacgctatgtgtattggagataagtataaatataaaatagtaacaaataaggttttagaggtaaaggcacaaggaagaggagatagacaaatgtgtcgaatggatagatttggatttcctagaacaaaagctaaaggctctaaagtagtaaaaggtttccaaacaggtgatattgtaaaagcagtagttaccaaaggaaaaaagataggaacttatcttggaaaagtggctgttagagttagtggtaattttaatattactacaactttagggactatacaaggtattaattttaaatattgtaaaactatacaaaaaggagacggctatgcttatgcagtggcaacaatcaaacaataa

SEQ ID NO: 207 - DNA, 273 bp, Unknown
  Ga0256845_1000645 JGI
gtcaataacctaccacaatccttgacggatatggaggaggcttgattgaccagattgagttgctagagatagctaactacgatatttttgttatcacaccttggggtgcttctccagctccaagctctgtgtaggctctttaagttgggttaaagccctgtgaacctaaggacgatttgccattgcaaacaagcatctatatcactatcgaggagagagtcgcaagaccgtcaccaccataaggtgcgttaatttgaaaaaggattgtaaatg

SEQ ID NO: 208 - DNA, 2412 bp, Human gut metagenome
ctgggcgaaggattacaaccgggcgcaagcccgaggagacaaaacttgagagtatttgttttgaacaaacgagggcaaccgctcatgccgtgttcaccggcgaaggcgcggttgcttctgaaggagaaaaaagcggtggtcaagcgccgtacacctttcacgattcaactcacgcaggccacgggcgaaacccgtcagccggtgacgttgggcgtggatgctggggcgaaattcatcggcctttcggcttcaacggacaaggccgagcactatgcttcggaggtcgaactgcgtaaggacgtggtggacttattgtcagcgcgtcgggagctgcgttgtgctcgccgccaccgcaagacgcgctaccgcgctccccgattcgataaccgtgtccattccaagaacaaaggctggttcgccccgagcgttgagaacaaaatcaacgcccacctgtctcgtgtagcggctgtctggaagattcttccggtgacgaagatcgtcgtggaaacggcggccttcgacatccagaagatcaagaacccgggcattgaatgcacggagtaccaacagggcgaccagctcggcttctggaacgtccgagaatacgtcctcttccgcgacggccataaatgctgccactgccacggcaaatccaaagatccgattctcaacgtccaccacctcgaaagccgtaaaacgggtggaaacgcgccgaacaacttgatcacgctttgcgagacgtgccataaggcgtaccacgcaggaaagatcgttctcaagcagaagcgtggacagtccttccgagacgccgccttcatgggaattatgcggtggacgttcttcaatcgcctgaaggcacagtgtccggaactcgaagtccggaacacctacggctacctgacgaagaacacgcgcattcggcacggattggaaaagtcccatcatacggacgccttctgcattgccggcaacttcgaagcaaagcgattgggtgagtacttcttccagaagcagacccgcaagcacaatcggcagattcacaagatgtcccttcttaagggcggcgtccggaaacggcagcaggctccctacgaggtgaaggggtttcggttgttcgacaaggtgcgtttcaacggtcaagaggctttcgttttcggtcgccgcagttctggttcgtttgatgtccggacactggcgggacagaaactctctgccgaggttaactgtaaaaaacttcggctgttggaaaagcgacggactttcttaacgcaacttttaaaggagaacgcgattcctatgaaagaacttcgatttgacgtcaccggcatgagttgcgccgcgtgttcggcccgcgtggaaaaagcggcccgcagcacggacggtgtgacggacgccgcggtgaatcttttgaaaaatacgttggtctgccgtttggcggattcggcggatgcggcaagcgtgacggcggcggtgtccgaagccgttgaaaaagcgggctacggggctcgtccggcgggaaagaccgaggacgcccaaaaagcaacggtcgcaaaaaatgaggcgcagaaagcggcggacgccgaggccgcggcgttaaaaaagcggctttgtctttccgtcgtgttctgtctgattctcttcgggctcgcgatggggccgatgatcggggtgacggtgccgggacttgatcccatgaagaaccccgcggggatggggctcgcgcaattcattctcgcgctccccgtggcgtttttaaaccgcaaattttttgtgaacggcgcaaagggcctcttaaaccgctcacccaacatggatacgttggtggcgatcggttccggggcgtcgctttgcttcgggatctttgcgcttttccggatgattgcggaagtgacggcggggaatcttgcggcggcgcagcactacgcgatgaatctttattttgattcgtcggcgatgattctcaccttgatcaccgtggggaaattttttgaggcccgcgcaaagggcaagaccacgcaggccatttcaagcctcatgaaattggtgcccgaccgagccgtgcgcttgacttcggacggtcgcgaagaaattgtggtggcaaccgacctgcgggttggcgacaaactcgtcctcaaaaccggggagcgcattgccgtcgacggcgtgattctcgaaggcgcgggaacggcggacgaatcggcgatgacgggggaaagcctgccggtcacgaaaaaggtcggtgaccgggtgtcgggcgcgacgctcgtgacgtccgggcgctttgtgatgcgggcggataaagtcggcgaagacacggccttgtcgcagatcatccgtttggtggatgaagcgacgtcgggaaaagcccctgtgtcgaggttagcggacaaagtgagtgccgtcttcgtgccg

SEQ ID NO: 209 - DNA, 246 bp, Human gut metagenome
gtcaaccacccctgcctgaaggcagaggcttgtgaaagcaagccttgattgactagccccagtgaggaaacgaactacgttggttgggaatgtataggcaccgcgggatgtcaatcctagttccgcgctctgcggcccgtgattaaaagcactgagaggtaggtgcggtgttgcgggtaagaaaccccttccaacctgggcgaaggattacaaccgggcgcaagcccgaggagacaaaacttgaga

SEQ ID NO: 210 - DNA, 915 bp, Chloroflexi bacterium
atgtcacatgtctttgtcatcgataccgacaaacagccgctttctcccgtgcatctggggcgagcacgcctgctactcaaagagggaaaggctactgtttacacgcttttcggttttgaggtgcgtgaatatgtattcgcaaagtggaaccgcatgtgtgcctactgtggagccagggacctgcccttagagctggagcatatcgtgccacgcgcacgcggtggcacggatcgcatcagtaatttgtgcctagcctgcgagtcctgcaatagacgcaagggaacgcaggatattagcgacttcttggccgatcagcccgcacggctctgccgtgtactagctcagacgaaagcgcctctcaaaaatgccacagcggtcaacgcaacccgttgggaactatcgcggcgcttgcaggccactgggctacccctggaaacgggttcaggtggacagaccaattataaccgcagtgtgcgtggcttgccaaaagcccactggacagatgcggcctgcgtgggagcatcaacccctacgcctctttccactgagggggtaatcccattgctcatcacggccactggtcacagtagacgaaaaatgtgcaataccaacgatttaggcttcccgaccagtcatcgcaagaggtgcaagcgctactttagctaccagactgccgatctggtgcgagcggtggtgccagatcgactcaagtgcgcggggacgcatgtaggcagggtgacagttaaagctgcgagaacctttaccatccaaacccggcatggcaaaatcactgatgtcccacaccgcttttgtcagcccgtccatcgctgcgatggatattcttattctcaagtggtgagggttgccccacccccaaccaacccgaaaggagcgcctgtttcctcctccgcctag

SEQ ID NO: 211 - DNA, 307 bp, Chloroflexi bacterium
gtcaagtccccccactgtgacgtgtcacagtggaggcttggaagcaagactttcaagcccgaaacttgagcagacagaggtttgaaagacaaccaacgttatcagcaagtgtaaaagaacctacctacagctgcttcaccagcttgtaaacctagaaccgttcagttaaaccggcgtagagggagaaaccagtgctgagcggaaagtagcgactgataaccgtgtcgaggtgagtatcacctgggaaaccagaggccccacggggcacaaaacaaaaagaaggaacgcaacgaccgtcatgtcacat

SEQ ID NO: 212 - DNA, 1041 bp, Unknown
  Ga0376455_0000343 JGI
atggtcattacattagacaaacacaaaaagcctgttggattttgtacggaacgccgtgctagaatcctgatgggtaagcggagagcgtgtttgtatcgtcgatttcctgctatcatcatcctcaaagacgttgatgtgcgggacttagagaatctgcacagctaccgcatcaaaattgaccccggctctaagtacaccggcattgcgattgtagacaacacagacaatagtgttgtgtttaccatgcagattgagcatcgtgctactacaatcgtaaagtcattaaaaacacgcaatgccgtacgtagaaaccgcagaaatcgggaaacccgttatcgccgttgcaagtggattaaccactacacgaaaaagggtagccgctacaaagcagattcgccccgccctgatggttggttgcctccgtctgtcaagtccattggtgacaatatcatcaactgggtcaagcggttgtgcaaatggattaacattacagagtgcagtttcgaggcagtgcgtttcgacactcagttgatggacaaccccgatattgagggtgtggaatatcagcacggaactctgtacggttacgaaatccgtgagtatctgctggacaagtacaagcatacttgccagtattgcaacggcgaatccaaagatgatgttctggaatgggagcataaacttcccaaatccagaggcggcagtgattcggtcaagaacgctacccttgcctgtcacaagtgcaaccaggacaaggggagtatgacccccgctgagtggttggaagttgtcaagaaacagcgttcttccaaactgcgtgatgctcgtattcagggaatccagcgtgtcattgataacaaaacaactggtagcaatcggtattgtgcgtgggtgtctgcaactcgtagatacatcgagcgatttctgtttgatgcgtttggcgatgtcgaatgttccagcggcggtagaaccaaatacaaccgcacgaagctgggacttcccaaagaccatcactacgatgctctgtgtgtcggtacagtg

SEQ ID NO: 213 - DNA, 308 bp, Unknown
  SL_8KL_010_SEDDRAFT_10003558 JGI
gtcaacaactcggctattgaataaccgagcatgaggacggggaatatccctttaaaactcatgtgaggttgtttgatagatttgttgagcagactaaggtctctcgaatgagagaactacgttatttgagtggcggactaggtgtgcttctccagcaccagtatccgaggctggcagtctaaacaggcaatccgagatgaaatagccagtgctgtcagcgtgaaacctcagataacattgtcgaggggacgtggctttttgccacacaataagcccgtaattgggatttaattaaggagcaacttatg

SEQ ID NO: 214 - DNA, 1359 bp, Leptolyngbyaceae cyanobacterium CCMR0082
atgtctaactatgtttttgtaattgaccaagacaaacaacccctcaaccctgtgcccccaggtctgggccgaaagatgcagaccgaccagaaagcggcaacattcaaaaagtatccgtacacgctgatacttaatcattctgttgtcgcgccaaggctaaaggggctaaccctcaagctcgatcctggttccaagtttttggggctctctatcttggatggcaacaaagtgatttgggccgccgaactagaacatcggggatggggcatccatgaaggacttgagaaacgttccggctatcgtcggaatagacgctcacgtaagactggctaccgaaagaaccggggacagtttgagtttaagcctgatggatggctccccccatcactgcttcaccgggttcaaaccacaatgacttgggtgaatcgactgcgcaagcttgcccccattgagtttgtcaagatggagctagtcaagtttgacactcagttgatggacaatgccgacattgaaggcacccagtaccagcaagggacattagccggatataccgccagggaatacctacttgaaaaatgggggcggcagtgcgcttattgcagcaagtcaggcgttcctctgcaggttgagcatgttcaccccaagtcgaaagggggatctaactcaatccgtaacttgtgccttgcctgtgagaaatgcaacacccgcaagggtagtaagtctgttgaggagttcttaaagaacaaacctgaggctcttaaaaggattcaggccacactcaagccccctctgaaggatgccgccgctgttaatgcgacccgttgggcgctttaccatgccctgcaagacacagggcttccagtgagcaccgcaacgggagcgcggaccaaaatgaaccgggctaaacaggggctacctaaggagcattggatcgatgcggcgtgtgttggtgatgggggagaaaacctcgatatcaagaccgctcaaccgctgagaattcaagcaaaggggcacggtagccgccaaatgtgtaaggtgtacggcaccaaaaagaacggtgaaccgatccgaggactgccctacccaactgctcccggcatgcctaagcgcagaaaggacggcacccgagaggcccccaagtttcgcctgcatggttctgttgagtcaggcgacattattgatgtccaaatccctaacggcaagtacaagggcatttacaagggagtcagagtggctgtcaggggtgacggtcggatagccataagacccaagggctttagctctaagttcgatctgaccaccgcatctatctacaaagttgttcaaaggaaagatggctatgcttactcggttcaatga

SEQ ID NO: 215 - DNA, 292 bp, Leptolyngbyaceae cyanobacterium CCMR0082
tctgactgctcgaccctatcgggcgagatgagaaagccgttagcttaccagctcaccgggttattggttttcccggtaaaggataggacacccgcaagggttgaaaaacgccaacaccttctctaatgcgagacgctaaccagtcgagagccagttgtgtagagggttgcccaaagctaagcgaggtcacggggttgactacagtgcgagggcagagcgaatgctcaaaagctgcttatccgagcgaggctcacattacccgatttatcggaggactcttatgtctaactat

SEQ ID NO: 216 - DNA, 447 bp, Scytonema sp. HK-05
cgctcaagaaaaactagatatcgtcaaccacgcttttctaatcgtagccgtaggcaaggttggctagctccttctctacttcaccgctttcttagtatagaaacttgggtcaaaagactttgcaaatattcacccatcacagaaatagtgatggaattagtgaagttcgatacccaaaaaatgcaagcagaaacgatagaaggtgtacagtatcagcaaggaactctctggggttatcaagttcgtgagtatctgttagaaaaatggggacgttgctgtgcttactgtaattcttctggtgttccacttcaaattgatcacatcaaaccaaaaagtaagggaggcagcgatagaatttcaaacctaacgttggcgtgtgaacgttgcaatctcgccaagggaaataaaccagttgaagactttctaaaaaaagattctgcgcgacta

SEQ ID NO: 217 - DNA, 325 bp, Scytonema sp. HK-05
cgtttgaccggcaatccccaccatgctcgcaatctgggattggtactgggacgcttggcacagggtgcaacaattttgttgggtctatttgtttctctgtccattgtgattcccacatttcgggcgggcgatttagtgcaactgctaggaattagcggtgtggcgattggctttgctttccgcgacattttgcaaaactttttagccggcattttaatcctgttgacagaaccattccaaattgatgaccagatagtctttaaaaactttgagggaactgtagaaagtattcagacacgagctacaacaatcagaacctacgatg

SEQ ID NO: 218 - DNA, 762 bp, Unknown
  Ga0310150_005743 JGI
atggtgtacgttatttcaaaagatggtaaaccacttatgccaacaaaaagacatggtaaagttagaagacttttaaaacaaggtcttgctaaagttgttagaagagaaccatttacaattcaactattgtatgatactacaacctatacacaacctgttactgtcggaatagacattggttcaaaagtagttggtatttcagcagtaacaaacaaacaagaattgtgcagtgctgaagttgaacttagacaagatatcagaaagttgctactgaagagaagagaacacagaaggtttagaagatatcgcaagagaagatatagaaaaccaagatttttgaacaggcgtcgatacaaaggatggcttgcaccaagtgttcaatggagggttgatgcacacatcagactggttaatttaatagccaagatactaccagttactaaagttgttgttgaaatagcaccatttgatacacacaaaatagttaatccagaagttagtggcaaagaataccaagaaggaccacaaaaaagttttagtgatgtaagagaatactgcttgtggagagcaggttataaatcagaactgtcgggtaaaaaaggcatacttgaagtccatcatattattccaagaagtaaaggtggtactgataatccctctaatttaatagtgttaaccgttgaggaacacaaagcaatacatgaggggaaaattaagattccacgtagtaaacttaaaaaagttaaaattctcaaagatgca

SEQ ID NO: 219 - DNA, 266 bp, Unknown
  Ga0310150_005743 JGI
gtcaactacccaccacttaaagcctaacggcttttgaagtgggggcttgccaagccctagttgactaccctcagccaggggaagttaatcttcctatcggactacgttagactggtcatgacaccctgggatgctgctcaagttccaggctctgtcgtatgtacctaaacagtcctgaggggtagggacagtggtacatacctaacaagccagtctaacattggggatgagcacctaactccttcaaaggaggcttaccacatatg

SEQ ID NO: 220 - DNA, 2244 bp, Leptospirillum rubarum
  MISC_FEATURE (966)..(1015): Any "n" represents any nucleotide
atggcccgtaagggcatttgcaaaggagagatcgtggctgtgtttgttctggacaagaaaaagaaacccctgatgccgtgctcggaaaaacgggccagactcctcctggaacggaaaaaagccgtggttcaccggatggctcccttcaccatccggctgaaagaccgggtcgggggcgtgacccaacccgtccgggtcaagctcgatcccggatcgaagagcaccggcctcgccgtggtccgggaggaggagggggacgggaagaccaccgcccatgtcctgtttcaggcggagatccatcaccggggagccgccattaaaaagaaactggaccagcgccgggccttccggagacggcggagggggaacctccggtaccgaaaaccccgggtcgacaaccggacacgtccggacggctggttgcccccgagcctgcgccaccgggtcgatacgaccctctcctgggtcgaccggctccggagacgggttccggtcacggggatcagccaggagctggtccggttcgacatgcagaagatcgaaaacccggaaatctccggagtcgaataccagcagggaaccttggccggatacgaggtccgggaatatctcctggagaagtggggccggacctgtgcctactgtgggtccgagaacgtgcccctcgagatcgaccacatccacccccggagccttggcggatcggaccgggtctccaacctgacgctggcttgccgttcctgcaacctgaagaagggaaaccgtccggtcggggagtttctggcgaagacgccggagcgtctgtcgatgatcctcgcccgggccaaggccccgctgaaagacgcggcggccgtcaacacgacccggtgggcgctgtttcaggcgttaaaggcgacggggcttccggtcgagaccgcctccggaggacggacaaaatacaaccggacccggctcggaatccccaannnnnnnnnnnnnnnnnnnnnnnnnnnnnnnnnnnnnnnnnnnnnnnnnngcgaaacccagcccattcgggtcaaactcgatcccggatcgaagaccaccggactcgccgtggtccgggaggaagagacggacggggagaagaccgcccatgtcctgtttcaggcggagattcatcaccggggatccgccatcaaaaagaaactggaccagcgccgggccttccggagccggcggcgaagtcagcttcgctaccggacgccccggttcgacaaccggacacgtccggacggctggttgcccccgagcctgcgccatcgggtcgacacgaccctcgcctgggtcgaacggctccggagactggttcccgtttccgaactgtcccaggagctggtccggttcgacatgcagaagatcgaaaacccggaaatctccggagtcgaataccagcagggaaccttggccggatacgaggtccgggaatatctcctggagaagtggggccggacctgtgcctactgtgggtccgagaacgtgcccctcgagatcgaccacatccacccccggagccttggcggatcggaccgggtctccaacctgacgctggcttgccgttcctgcaacctgaagaagggaaaccgtccggtcggggagtttctggcgaagacgccggagcgtctgtcgacgatcctcgcccgggccaaggccccgctgaaagacgcggcggccgtcaacacgacccggtgggcgctgtttcaggcgttaaaggcgacggggcttccggtcgagaccgcctccggaggacggacgaagtggaacaggactcggcttgtgctccccaagacccatgccctcgatgcagcgtgtgtcgggaatatcgacaggatcgagggctggaaccgtccctacctttcgatcaagtccacgggacggggatcgtatcggcggacccggctggatgcgttcggcttcccccgtgggtctctgacccggacgaaagcccacttcggttttcagaccggagaccgggtcatggcgatcgtgacgaagggcaaaaaaaccggaacctatgccggacgggtggccgtgagaagctccggcagtttcaacctccagaccggctccggagtggtgcaggggatttcttacaaggactgtcggcttctccagcgggccgacgggtacggatattctatccatccgatcactgagaaaggagaagcgggagaggcgctatccctccccggcatgaatgccggagtctcccgcgcaagaggatga

SEQ ID NO: 221 - DNA, 298 bp, Leptospirillum rubarum
gtcaaccaccccgccctgaagggcggagcttgaaaggaggttcgacaggctcgggttgaccagggaaagcggtacccaacccgctccgttggcaacaggtacaagacccaccccgggatgcttcctcagtcccgggctctggaagccgccgatgcagacaaccgcgagggccaggacgaaacggtcggcggcaagggagcgatcccgaagccggttgccaacattcccgaggggagacgcgtcgtaagacgcgcgttacatggcccgtaagggcatttgcaaaggagagatcgtggct

SEQ ID NO: 222 - DNA, 972 bp, Unknown
  Ga0209061_1001914 JGI
atggtcccggtgctcgacagcagaggggccccgctcgacccatgcacggagaaacgggctcggctgctgcttgagcgtgggcgcgccgtggtggtgagccgcaacccgttcgccatccggctgaaggaccgcacggcagagcagtcggtcgtccacccgctcgtctgcaagctcgacccaggctcggccaccgacggtgtggcgctcgtgcgcaggcaggaaggcacggacgtgctcgtggccgcagcccacgtcgagcacaagcgctcggtgagcaaggccatcgccaggcgcgccggttacaggaagcggcgccgctccaagctctggcaccggaaggagcgctcctccaaccgcaggcccgccccctgtacctcctgcggggccaacgccgtgcacggccgggaccgctgcaggccctgtgccgaggcaagggccccgcgcaccgagggcgcccgcccacggcggctcccgccgtctctcagggcacgggtggacgagaccgtccacgccatagagaagctggccaagctctacccgctggcggccattgccatagaggtcgcccgcttcgacgcacagctgttgcgcgacccaggcgtctcgggcgaggggtaccagcaagggccgctctaccagtcaaacctgcgcgagtacgtgctccaccgcgacggccacaggtgccgctactgcggccgccgcggcgtggcgctcaacttggaccacgtcaccccgaggtcgcgcggcggggccaccagggccgacaacctcgtggcgtgctgcctcaagtgcaacaaggccaagggcaaccgcgacgccgccgagtacggccacccggaggtccaagcgcaagtcgacgtgccgctcagggacgccgcctacgtcaactaccccgccctaaagggcggggcttgtgggaaggtcccacaagcccaggttgaccaggccaagacatcgacgaaagagaggtga

SEQ ID NO: 223 - DNA, 354 bp, Unknown
  Ga0209061_1001914 JGI
gtcaactaccccgcccttacgggcggggcttgtggggcaacccacgagcccaggttgaccagagggcttggcaggaaggaggcaagaaagccaagcagaagcgcgtcaggtaggcgcaaaagcacctcgggatgcttctccagtcccgagcactgcgcaccacgcaaggagacaaccgtgagggcaatgggcgaaaccgtgcgtgggagccgaggatcctgacaaaacgcacccccgaggagagaccaaagcctcccgcctccatctgggaggttgcggcgtcactaggcccgtaagggcacctataaggacaaggaaggagcatgaagaaatgagaggagggcaaggctgatg

SEQ ID NO: 224 - DNA, 816 bp, Unknown
  Ga0334887_1007052 JGI
atgctagtctatgttcttaacaggcacgggaaaccgctgatgccgtgtaaaccacagaaagcacgaagactattgaaagaacaaaaggcaaaagtagtaaaaagaacaccgtttactattcaactgttgtacggttcctctggatacaaacaagatgtaattctcggtgtagatgccggtagcaagacaataggagtatcggcctcaactgagaacaaggaagtgttttcagcagaagtcgaattgagaacagatattgtagatctgttatctaccagaaggacgcttagaaggtctagaagaaacagaaagacgcgttatagacaatctcgtttccttaatcgaagaaagcctgaaggttgggtagcaccgtcggtacagaataagattgacactcacattaaagtggttaagctggttcacgcaatcctgccaataactagagtagtagtagaagtggctcaattcgacatacagaaaataaagaaccccgacattcttggcgaggattaccagcaaggcgaacagctgggattctataatgtcagggagtatgttttgttcagggataaacatacctgtcaacactgtaatggtaagtcaagggatccaattctaaatgtgcaccacatcgagtcgagaaagacaggcgggaactctccggataatttgattactctatgcgaaacctgtcataagagataccataaaggggagatcagacttaaagtcaagcgaagttcttcattcagggatgcagcctttatgggcataatgcgatgggcttcctataacaaactaaaagaactgtattca

SEQ ID NO: 225 - DNA, 239 bp, Unknown
  Ga0334887_1007052 JGI
gtcaaataccccacggctaaagccgggagcttgtaaaagctctgtttgactagcctgagtgcttcgagcactacgttatcggcaaatgtataggcaccgtaggatgcgttcccaagtcttacgctctgcggttggtggttaaacagtcctgatgggtagggacagtgctgctaacgagaaactgtcgaataacattggcgatgggaagattactccgtaaggaggtagactatatgcta

SEQ ID NO: 226 - DNA, 1344 bp, Halomonas jeotgali Hwa
atggcggttttcgtgttggacaaacgcaagcagccgttgatgccgtgcagcgaaaagcgcgcccgattgctgctggaacgcggtcgcgccgtggtgcataaacgctatccgttcacgatccggctcagggatcgggtgggcggcgacacgcaggcgcttcgtctgggcattgatcccggcagcaaggccacggggctggcgctgatgcgtgaatcggacggtcagcagcgccatgtgctgtgtctgttcgagcttttgcaccgcggctttcagatcaagaaggcgctggaacagcgcgccgcgtttcggcgtcgccgccgttcggccaatctgcgctaccgggcgccacgctttgataatcgcactcggcccgaaggttggctgcccccttcattgcaacatcgggtcgataccgtcacggcctgggtggaacggctgcgcaggcttgcaccaatcaccgcactggaccaggaactggtgcgctttgatacgcaaaagctcgacaacccggaggtcagcgacatcgagtaccagcaaggcacgctgctcgggtacgaggtgcgcgagtacctgctggagaaatggggccgggaatgtgcctactgcggcgccaccgagacgccgctggaaatcgagcatgtcgagccacgcagccggggcggttccaaccgcgtcagcaacttgtcattagcctgccatgcctgcaatcaggaaaaggatcggcaatcgctgactgacttcttcgctaccagcaaacgtctcaaaaagcgcctcaaagccaatggtctgtcggcgaacgtgcagcttgagcgcgtacagcgccagctcaagcagccgctacgcgatgccagcgcggtcaatgcgacccgctgggcgctgtttgacgccctcaaggccaccggcttgccggtcacggtcggcacgggtggacgtacaaaatacaaccgccagcggctcggcattcccaaaactcacgccctggatgccgcctgcgttggcgcgatggaggcgctgcacgactggccggtgccaacgctgatgatcaaggccaccggacgcgggagctatcagcgcactcggctgacccggcacggttttccgcgtggctacctgatgcggcaaaaacaggtacacggttttcagaccggcgatagggtcaaggccatcgtccccgccggcaggaaagccggcacgcatatcggtcgtgtggccgtgcgcaaaaccggccgcttcaacatccagacgccacagggggcagtacagggcatttcgcacaagcattgcaccctgattcaacgcggtgatggctacggctaccacctcacaccatccatcaaccactaa

SEQ ID NO: 227 - DNA, 1344 bp, Halomonas jeotgali Hwa; identical to SEQ ID NO: 226

SEQ ID NO: 228 - DNA, 1410 bp, Unknown
  Ga0222658_1000616 JGI
atggaaacagaaaagactaagaacagacctgggaatgctccacaagttccctgctctctggtgcgagttaaacagagttcaaagactcagtgcgtagcgctattgacttctaataacaacctcgatgtggatctacctcagcatagagaggggcggaacttgagagtctccgccaacgtctatgtacttaatatgagaggggaacccctcatgccatgttctccgagaaaagctaaaaagttattaaaagagagcaaagccgttgtccgtaaaagatgtccatttacgatacaactgacaacccaaacaggggaatcttgtcagagcattagtttaggcgttgattcaggcacgaaattcataggaattagtgccacaacagagaagaatgaactattctcagcggagttagttcttgacaccaacctcaaggaaaggcttgctagcagacaaatgtatcgcagaaacaggagaagcaggctatggcatagagaacaacgctataataataggagaaaaccccgtggttggttaccaccatccatagaaagacggtataatactcatatcaatatcattgaatttattaagactgttttgcctgtgtctaatgtaactattgaacttggaaactttgatacgcagaagattaaaaatcaagatatcaatggaaagttatatcaacaaggtgatatgtatggatatcaaaatatgagagcataccttatagcaagagaaaaaggtatctgtcagttttgtgggaaatctgttaagggaaagaagatttctttgcatcatatagaatcaaggaaatctggttcaaactctgcatctaatatggctttgcttcacgaaccatgccataagaagatgcataaaatgggtttagaaccaaaaataaatagaaataagcagttccgtgaacatgcttttatgaacataatgcatgaaaaaatacagaaagaaactgactataaacgaacatttggttacgtaacatttgttgacaggaatgctatcggcttagaaaagtcacatattaacgatgctttcgttgtctcaagtggaggaatccaaaaaagatgtataccattctctattgagcagaaaagaaagaataacagatcactacaaaagaacagaaaaggttatgctcctagcatcagaaggcaaagatatccaatacagatcaatgatctggtaaaaataaacggacagtgggttcagacaaaaggtacacattgcaaaggaacaagaattatggtaaataaaaaatctattaacattaaaaatgtggaaagtgtatttcatcgaggaactcttaaatggagtatagattcttcttgtacatatgaagctgatgggattgtaacttttaaacatcatgaagggagcaaatatgacgaatga

SEQ ID NO: 229 - DNA, 295 bp, Unknown
  Ga0222658_1000616 JGI
cggaagtaaagcataacatatataatgacaatcttcctgttggtaatgatgacaagggtgatccatatttagatgaaagaactgactttattactatatctgatctcgtaaatgaaaaatatgacaagagtgatggtaaatctatatatgtacaagaaagaagggatgccgtgcttcttctgtatcgggctattagcaaaaggatcgtatcgtcaactacctccggttaaacccgcgggcttgtagtgtgagctacaccgataaagagttgattagagggcttgaaaaaagcaga

SEQ ID NO: 230 - DNA, 1374 bp, Unknown
  GENOME_ACESSION: IMG_2061766007_$F_2061766007 JGI
  MISC_FEATURE (104)..(113): Any "n" represents any nucleotide
  MISC_FEATURE (259)..(795): Any "n" represents any nucleotide
  MISC_FEATURE (1360)..(1369): Any "n" represents any nucleotide
atgtcttcgacgagaagagctctaagaagctctaccgcacgatgtccctgctcgcggaggtacagtgatttaccgtgcagcatacctggtgctttttctccatnnnnnnnnnntaccgaggacgagcgcatcgcctactaccagaagcagctcggcaaggtccgggagatgctatcgcagaagttcttcaagccggaaccggcatacgaggaagcctaccttaataacacaaaggtgacctacatagcgacttccggannnnnnnnnnnnnnnnnnnnnnnnnnnnnnnnnnnnnnnnnnnnnnnnnnnnnnnnnnnnnnnnnnnnnnnnnnnnnnnnnnnnnnnnnnnnnnnnnnnnnnnnnnnnnnnnnnnnnnnnnnnnnnnnnnnnnnnnnnnnnnnnnnnnnnnnnnnnnnnnnnnnnnnnnnnnnnnnnnnnnnnnnnnnnnnnnnnnnnnnnnnnnnnnnnnnnnnnnnnnnnnnnnnnnnnnnnnnnnnnnnnnnnnnnnnnnnnnnnnnnnnnnnnnnnnnnnnnnnnnnnnnnnnnnnnnnnnnnnnnnnnnnnnnnnnnnnnnnnnnnnnnnnnnnnnnnnnnnnnnnnnnnnnnnnnnnnnnnnnnnnnnnnnnnnnnnnnnnnnnnnnnnnnnnnnnnnnnnnnnnnnnnnnnnnnnnnnnnnnnnnnnnnnnnnnnnnnnnnnnnnnnnnnnnnnnnnnnnnnnnnnnnnnnnnnnnnnnnnnnnnnnnnnnnnnnnnnnnnnnnnnnnnnnnnnnnnnnnnnnnnnnnnnnnnnnnnnnnactaccaaaaagaaggtattgttcgaggctcagcttgaactgcgtgacgatatcgtgaagaaactcgccaccagacgcgagttccgtcgggcaagacgaaaccgtaaaaccaggtatcgtaaagctagattcttgaatcgtaccaagaccaagaaggaaggatggcttgccccgtccatcaagcacaaggtatggtctcatctatggaacatcgctagaatcaagcgaatccttcctataagcaggataaccatagaggtggcccagtttgacacccagttgttaaaggctaaagaacacggtttgcctgttccacagggtacggattaccagaatggtgaacaactgggtttctggaacgtaagggagtacgtattgttccgtgacggtcatagatgccagtgctgcaagggaaagacgggcgattccgttctcaacgtgcatcacatagaatcccgaaagaccggtggtaacgcacccaacaaccttgtgactctttgtgaaacttgccacaagagataccataggggtgaaatcaagcttccgacatctataaaacgtggtnnnnnnnnnncttaa

SEQ ID NO: 231 - DNA, 328 bp, Unknown
  GENOME_ACESSION: IMG_2061766007_$F_2061766007 JGI
  MISC_FEATURE (149)..(158): Any "n" represents any nucleotide
  MISC_FEATURE (315)..(324): Any "n" represents any nucleotide
gtcggcgccacgtccgagcgcggagtgttcaagatatattccagggaggaactcaggaagagccatagggcagcggcaacggcatacgcagtaatgtacgcgataatgccgtatcctcccggactggactatggcaagttgaatagctnnnnnnnnnngggcaagggtcggcgccgcgtccgagtacggagtgttcaagatatattccatgaacgagctcaggaagagcccgagggcagtggcaacggcatacgcagtaatgtacgcgataatgccgtatccgcccggactggactatggcaagttgaatagccnnnnnnnnnntcca

SEQ ID NO: 232 - DNA, 657 bp, Microcystis aeruginosa
  MISC_FEATURE (298)..(397): Any "n" represents any nucleotide
atggcaagagttcctgttatctcaaaagacggaaagccgttgatgcccaccaaacccagtcgggccaggcggtggattaaggaaggaaaagctatcggtaaattcaacgacttagatattttctatgtccagctaaccactgaaccttccgataacaaaacccaaccgattgctattggtattgacccgggtaaattattctctggaattggcgttcaatcctctctttttactctttggaaggctcacttagaacttccttttaagcgagtaagagagtgcctagacaatcgatgcnnnnnnnnnnnnnnnnnnnnnnnnnnnnnnnnnnnnnnnnnnnnnnnnnnnnnnnnnnnnnnnnnnnnnnnnnnnnnnnnnnnnnnnnnnnnnnnnnnnnccgatatttactttgagtacatcaaagccgatattgatttaacttccagtagaaaaggagctaagtctggaaaaggtttctcgtcggttatggtcggacagaaatgggcgattgagcaactatctcaattggcaaaagtccatacccgctttggttggcaaacctctaatctcagaaaatatttgcgactagaaaagtccaaaaataaagcaaaacaatcaccagaaagtcatgctaacgatggcattgctaagaggtag

SEQ ID NO: 233 - DNA, 222 bp, Microcystis aeruginosa
gtcactaaccccgccctaaaagggacggggcttgcctagaccaatttaggcgacgcaagtagagactaccgcatcgagacacaatctggcccagacctccgaatacttccctagttcggattccctctcagctctattggtaaagcgttgttagacaagacatctggattgtgttgcggtaagggactttaactttactcttaaggattatctccatggcaa

SEQ ID NO: 234 - DNA, 813 bp, Unknown
  Ga0255147_1001158 JGI
atgttagcgtatgttctgaacgcccaaggcgaggccctcatgccgtgctctcccgccagggcgagaaaacttttgagggacaaaaaggccaaggtcgtccgccgtatgccttttaccatcaaactcctccatggctcgtccggctatcggcagaaggtctcccttttggtcgacgccggggctaaccatataggggcggcggcaaaaagagaggacggagtagtgctctacgcgtccgagacaaaaacaagaggagacatcacagaaaaaatgacccaaagacgctcctatcgaaggacaagacgtggaagaaaaacacgctatcgggctccgaggttcgacaataggagaagaaaggacggctggctcaccccgacggtctggagcaaaatcgaggcgcacgtcgccgagatagccttcgtcaaaaaaatgcttcccatatcgggaacaaaaatcgagacggcctcgttcgacatccatgggatttctaatcccgacgtcaaagactatcagaatggactacaaaagggcttttataacctaaaagagttcgtccttcatagggattcccacagctgtcaggagtgtcggggtaagaaaaaggacaaaaggcttcacgtccaccatgtgaggtttcgctctaacggcggcacaaatgtcccggagaacctcatcaccctgtgcgaaagttgccacaatgcccttcacgcgaaaaagaacgcccaatccgtatcgctggaaagatacgggaagaagaaagccccttcgctgaagggtgcgaccatcatgtcgacggtatcggcggccctcgaa

SEQ ID NO: 235 - DNA, 309 bp, Unknown
  Ga0255147_1001158 JGI
gtgaagcctccccgcgactaaagatcgcggggcttcctggaaacagggagcacttcaccagaccaccaacaaagaaaggagtttaggctaaatgttggtagacgatggacaggaatatataggcacttcgggatggcgactcagtcccgaaccctgcgccgtagcgttaaaagccggaagaggtgtcggcggtgcgctgcggatagaaaaccctgcattcatcaggtctagagtaggtcggagtcctttggcggctttcccgccgaaggatacgcacgactccagttcagggaggtacgctttatgtta

SEQ ID NO: 236 - DNA, 1257 bp, Unknown
  Ga0137716_10010158 JGI
atgttagccttcgtattaaacaaatatggtaaaccacttatgccctgtcatcctgctaaggcaagaatactgctcaagcagggtaaggcaaaagtggtaaaacaaactcccttcaccattcagctactgtatggcagttccggttacaaacaaccagttgtgcttggagtggattctggatatagcaatgtcggattatcagcagtctctgagaaaagagagctgttttcagcagaagttgccttgagaacagacatagtcaaacttttatccgaaagaaggcagtatcgtagattcagacggtatcgtaagacatggtatcgtaaaccgaggtttcagaacaggaaaaaacctgaaggatggctcgctccatctattcagaacaaactggatactcatattaaggttatcaatcaggtcagcagaatactccctgtaacagaggtaaaagtagaagtagcagcatttgatattcaaaaaatcaaaactcctgatatatctggtgtggattatcagaatggggtgcagaaggggtttagtaatgtcagggagtatgttctgtctagagatgggcatatctgtcagcactgcaaagggaaatccaaagaccctgtgttagaagttcaccatatagtatcgaggcagattggcagtaatagccctgataacctgataaccctttgcaggacatgtcatcaaaaggtttctcaaggaaagattaagctacaggtgaccccttcaaaggagtttaaggcagagacctttatgactacggttagatggaaactgatagagagactgagagaactcggttatgaggtttcacacacctacgggtatatcacaaaggacaaaaggatagcgttagggatagggaaatcccatgctaacgatgcctttgtgatagcagggagaaacggtcaaaggagactatcagttcagtattttattcagcaggtaagaaagtgtaatcgtaagctattcaaaggtgacaggtcacatatcaagaacatagccgacaggtttgtaaaagggtatcagaggtttgataaggttttgtggaaaggtatagagtgtttcatctttggcaggagggtaacaggatattttgacctgaggaaattagatgggacacggttaaacccatcgttaagttataaacaaatctctctccttgagagagcaaagacattgctaatagaaaggaggataggtctctcctccccatgtctgaaggcaggggtctccgagacctga

SEQ ID NO: 237 - DNA, 260 bp, Unknown
  Ga0137716_10010158 JGI
gtcaatcaccccatgcctgaaggcaggggcttgtcccgtgagggataagggtaactggttgaccagggggcatggagaaccatgcagcagttatcaggaagagatacatacacaccccgggatgttccgccagttccgggcaactgtggtctgtcattaaacgtggtggaaacacccagtgtggcaggcttaaaaactcctgataacatcccgaggcggcacttactccccgtaaggggaagagaggaggctttatgtta

SEQ ID NO: 238 - DNA, 1341 bp, Unknown
  Ga0257068_1000081 JGI
atggcagtttttgtactggaccgtcacaagaaaccgctggacccgtgcagcgagaaacgcgccagacagcttctggagcgaggacgcgcacgtgtccacaaactgaaacccttcacgattcgcatcgtggaccggctttttgaaaacagctgcgtcaacggcgtcgcggtcaaaattgaccccggcagccgggagacgggcatcgctgtcgtccgcgaggacggtgacggagcccacgccctagcgttcatcaatctcagacaccgcggtctcgtcatccgcaagaagctggagcagcgggccgcatatcggcgtcggcgccggtcctcgaatcttcggtaccgcgcgccgcgttttaacaatcgtcgcaggcccgaaggctggcttgcgccaagcctgcggcaccgtgtcgactccacggtcgcctggatgcgcagactgtgccgtattgcgccggtgcgccgtatctcgatggaactcgtgaagttcgacatgcaggccatgcagaatccggaaatctccggcgtcgagtaccagcagggagagctcgccggctatgaggtgcgcgagtacctgctggaaaaatggggccggaagtgcgcctactgcggcaaggaaaacgtgccgctggaaatcgagcacatcacggccaaatcggtcggcggcagcaaccgcgtttccaacctgaccctcgcctgtcatgactgcaaccaggccaagggcaacatgccggtcgaggcgttcctgaagaaccgcccggaagccctggacaggatacggcggcaggcaaaacagccgctcaaagacgcggctgcggtcaatgccacacgctgggagctctacagggagctgcaggtcttcggactgcccgtggagactgccagtggcggcaggacgaaatggaaccggacgcgtctccatgtgcccaaggcgcactggctggacgccctctgcgtcggcagtgtggacgccgtgtccgggattgggaagccagtgcttgagattgcctgcacaggccgcggctcgcatcagcgcacccgcgtcgacaggaacggcttcccgcgtggtttctgtctgcggcagaaacgtgtccacggctttgcgacgggcgacctggcggccgctgtcgtgcccaggggcaaacatgcagggaaacatgtcggaagactcgccgtgcgcgagaacggttccttctgtgtggctgcggcagacggtaagcacgacggcatatcgtggcggcactgcaggctgctgcagcgtgccgacggctatggctacgggcatctgctcggtaacgtcaaccaggaaaattttggaggcagcgtttcctccccggcttga

SEQ ID NO: 239 - DNA, 283 bp, Unknown
  Ga0257068_1000081 JGI
gtcaatcaccccgccctgaaggacgaggcttgtaaaagctgaatcccaagagccgattgaccagcccaagtgaggtgtaaccggactccgttgctatcaggctaaagaccaacgccagaatgcttcctcagttctgacctcttgaaattcctgttgcagacatgcccggggtaggcgcgaaacgggcaggagtgtgacaccggacagcaacatgggcgagaggagccggcgggcaaccgccgcgtaacagggccccttgcggggcaggaaaacgacaatggca

SEQ ID NO: 240 - DNA, 1284 bp, Desulfobacter sp.
ttgaacgtatttgttttagatacaaacaaaaaaccacaaaatccagtgcatccggcaaaggccagattgcttttatcggaagagaaagcggcggttttcaggcagtatcctttcacaattattttaaaagaagagattggggtaaatccacaagcacttcgggttaaaattgatccaggcagcaaaacctccggcattgccgtcactgatgatgccacaggtgaaatcgtttttgctatgcaattagaacatcgaggccaacaaatcaaaaacgatctggaatccagacgggcaatcagaagatctcggagaaacagaaaaacccgatacagaaaaccacgatttgaaaacagaatcagaccggaaggatggttggcgccatcattgaaaagccgggttcacaatattgagacgtgggtcaatcgattatgccgattcagtaatattcaggcaatctcaatggagcttgttcgttttgatatgcagaaaatactcaatcccgaaatctccggggttgagtatcagcaaggggcactttcgggatatgaggtacgggagtatcttcttgagaagtggggcagaacgtgtgcctattgtggcaaaacgaatctgccactggagattgagcacattctcccgaaatcaaagggcggttcaaatcgcgtcagcaatttgaccctggcatgtaccgaatgcaatcagaagaaagggaacaggccgattgacatcttcctttcaaagaggccggaattactgaaacggattcaagccagggcaaaagcaccgctcaaggatgcggcagccgtcaatagtacccgatgggatctattccgcacactgaaagagacagggcttcctgtggagattggttccggcggattgacaaaattcaaccggacaattagagggctttccaaaacacattggcttgatgcggcttgtgtggggaaaagcacacctgaaaaattattccaaactgacaaggctgttttgattgttaaagcaaatggtcatgggagcaggcaaatgtgccgggtcaatacgtttggattccccaggacaaaagcgaaatcccggaagaaaaaagttaacggttttcagacaggtgatattgccaaagcaattgtgacttccggaaaaaaggttggaacatatattggtcgtgtcgccgttagaaaaagtggattttttaacattaagacaagagaaacgaccatacaaggtattaattggaagtattgtcatatgcttcatatgtctgatggatattcatataacatttga

SEQ ID NO: 241 - DNA, 246 bp, Desulfobacter sp.
gtcaactacccctcctgaatcacagattcagaaggggcttgtaaaaagccctatgttgacccgtctaagtgctttgcgcactacgttagatcggaaataggtaccctggggtgcttgccagctccaggcgctacggcaagtagttaaacaggtgtaagaggttaaaccggtgctgcttgcgctaaacccggtcataacattgacaaggcaaacattaccctggaaacaggagaatttagattgaac

SEQ ID NO: 242 - DNA, 915 bp, Anaerobic digester metagenome 6175
  misc_feature (63)..(72): n is a, c, g, or t
atgggcattatgcgctggacagtctacggtaaactcaaagaattataccctaatgtcaaattnnnnnnnnnncatatcggtctatcagccacaacagataagaaagtcttatttgaatctgaagtcgaattaagaaacgacatagtaaaactcctatcaaacagaagagaattaaggagaggcaggagatatcgcaaaaccagatacagaaagccaaagttcaataaccgcaaaaaacctaaaggttggttagctccttcaatcaggaacaaaattgatactcatctgaaggttatcgctttagcttgcaatatactgccgataacaaaactgaccattgaagtagcacagtttgatattcaaaagattagaagccccaacatccaaggcaaatcataccgagatactgctttcatgggcattatgcgctggacagtctacggtaaactcaaagaattataccctaatgtcaaattgacctacgggtatataactaaacataccagaattaacgcagggttgaacaagtttcatcgtacagatgcacgctgcatcagcggcaacccatcagctgaaccactaaacatctggtactacttcaagcaagtaagaggccagaaccggcagctgcacaaagccaacccgaaaaaaggcattcgcaaggccaacaaagccccgcgatacgttcacggttttcagttatttgacaaggtactgtatcagggacaagaatgttttatctttggcagacgatcatccggctattttgatttaaggaaattggatggtagtaaagtacacgcatctgccagccataagaaacttaaattgctagaaagcgcaaatacattattatgcgaaagagaggaagtggcttcctccctacgactaaagtcgggggtatacgccgcgtaa

SEQ ID NO: 243 - DNA, 240 bp, Anaerobic digester metagenome 6175
gtcaatcaccccacgcctaaaggcgggggcttgcaaaagtcttgattgactagcctcagtcttaattgactacgttatattagaatacatagttaccctgggatgcgtgcccaagttccaggcactaaggtcggtggttaatcagttctgaggggtaggaacagtgctgctggtacaaaacctaatataacattggcgatgggcaaccaactccaaaaaaaggaggtaggcttaatgcta

SEQ ID NO: 244 - DNA, 981 bp, Fischerella sp. PCC 9605
atgaactcaaatgctcgaattccagttttgtcaccagatggtaagccattgatgccaaccttgtatcgacgggcacaggtctgggtagaacaaggcaaagcaaaatggatcggcaatgacctgaatattaagcaagttcatctgttacaagaaccatccggtaacgcaactcagcccgttgcgatcggcattgaccctggtaaaaagttttcaggaattgctgttcaatctagtcagttcactttgttcgcagcacacttggtattgccgtttcctaatgtcactaaaaagatgacggggagacgaattttaagacgtgcgagacgctcaagacgtatcaaccgcaaaattccattccatcttagggcgcatcgtcaaaaacgctttgacaatcgcaggcacaaaaaactggttccatctatccgtgctaaccgtgaatttgagttgcgagttgtcaaagagttgatgcgactattcccagtctcaactattgtctatgaatacatagaagcaaagggggataaagcgtttagtcctgtaatggtgggtcaaaaagtcatgttggagttcttaacagaactagctccagtggcaacttgttttggttggcaaaccgctaacctcagaactcacctgaatttgattaagcacaaaaacaaggcctcacaatctcctcaatctcatggagtagacggaattgcgttggcttctagccaattcgtaaactacgaagccttccaaaccaagcgagaacatgggcgtcgctgggttggaagcgtgcgtctgacgccttctccgtttcgggtgattactcgccccaatctattccgtcgccagttgcactttgagaatttcaggcaaggcgctgtacgtaagcgtaaggggggaactgttacgccattcggatttcgttctggtgatttcgttcaaggtgaaaaggctggaaagattcatagaggttggattggtggctttaagtga

SEQ ID NO: 245 - DNA, 238 bp, Fischerella sp. PCC 9605
gtcaagaacccccacctgcactcttgcaagtgggggcgtgaaacagccaggttttaccggtaactcctgactagagccaatgagccactatctcgcacggacttccgcttatttccctagagcggattatctccaaacctactggctgtaggtgcttgagggtcgctcaaatgattcggaggcaacctccgaatccgcgacctccagaaaggacatcgtgatagtggtggcgtaaggg

SEQ ID NO: 246 - DNA, 1152 bp, Unknown
  Ga0187846_10005139 JGI
gtgttcgtttacgtattaaattgtcacggtgaaccgttcatgccctgtagaccacgaaaagcacgcctgctcttgcaagagggcaaggcgaaggttgtgagaatggttccgttcacgatccaactgctgtatggcagcagtggctacaaacaagcaatctctcttggtgtcgatgcaggcacccaacggatcggggtttctgcgaccactgagcggcaagtgcttttcgaagcagaggtgcagcccagaactgacatccaggcattgctggcgacccgccgtcaattccgccatgccaggcgcagtcgcaagacgcgctatcgccagtgtcgtttcctcaatcgaaagaagcgatcaggctggctcacgccttctgtgcggcacaaagtagcagcccatctgaaaacaatccgtttggttcaccagttggtgcctgtgagtaggaccaccatcgaggtggcacagttcgacatccagaaaatacgcaatcccgagatcgagggcagagagtaccaacacggtccccagctcggtttctggaatgtcagggcatatgttcttgccagagaccgtcatgtgtgtcaatggtgtcagggccagtcgcaagaccccattctcacggtccatcacatcgagtcccgcaagacaggcggggataggcccgagaatttgatgactttgtgtgagacgtgccatgatctcattcaccgaatgcaccaggaacacacgatcgaacagaagtccaggggctttcgagatgcggcgcaaatgggcatcatgcgctggcgcatctatgagcaggcgaaagcactcttcccgcatgtccatctgacctatgggtacatcacaaagcacactcgaattgccaaccactttgaaaaatcgcatgtgatcgacgctcgctgtatcagtggtcatgcgctggcatgctcggatgagacgtggtatctgatcaagtacgtgaggagaaataagcgtcagttgcacaaagcgaccatcagaaggggcggcaagaggcagtgtcacacggctcccaagtatgtccacggctttcgcttgtttgattgcgtgaactatcaagggaagtgctgttttgtgtttggcagacgcagttctggctactttgatctgcgtctgcttgacgggacgaag

SEQ ID NO: 247 - DNA, 237 bp, Unknown
  Ga0187846_10005139 JGI
gtcaagaacccaatcgcctccaggcgatgggcttgtgtgaacaagccatgcttgactagcctgagtctagactacgttcgacaggtcatgctacctacgggtgcctactctagcctgtagctctagcgtctgtgattaaaagctctgatgggtaggaacggtgttgcagacacgacaagcctgttgaaccttggcgaagagtaccatacatccgaaaggatggtaaacgttgtgttc

SEQ ID NO: 248 - DNA, 825 bp, Moorea sp. SIO3G5
gtgaagccagtgtcaggagcatgcacaagctttgatagccgagcgaggcacactttaccctcaacgggagtaaacacatgcgccatgtgtaattacgtctttgttttagatgcaaatcataaacccctcaacccctgccgtcccgttaccgccaggaagctgttaacggctggtaaggcggctgtatatcgccgttaccctttcaccattatcttgaaaaagcaggtagaggccgaacccaaaccgatgtctctcaagatcgatcctggctccaagatgactggtctagctattgtgtacgggaatcaggtggtatggtcagctgaaatcgaacatcgtggctccaaaatcaaatcagctcttgactctcgtcgggcagtgcgtcgttcccgtagaaacaggaaatgccgctaccgaaagccacgtttcaacaaccggaaacgcccagaaggttggttggctccgagcctacagcacagagtggcaaccactatgacctgggtgctgagattaattaaactcacccccattggttcgatatcccaggagctagttcggtttgatacccaaaagctgcaaaatccggaaatctctggcatagagtaccaacagggggagctgatgggctatgaagtgcgggagtacttgtatcagaaatggggtcgtcaatgtgtttactgtggggcacactcggtcaagctagaggtggaacacatagttcccaaatcaaagggaggaaccaatcgtgtcagtaacttaaccctagcctgtcatcggtataatcaggccaaaggaaatcttaatgctcaggattttttattgggg

SEQ ID NO: 249 - DNA, 271 bp, Moorea sp. SIO3G5
cagaagcagaccaattactaaaccttagcaaacctgctcaaatcggggtttacctgagtcttcagattggtcaagctcaccaaatggtaaacgctatcaaggtcaagataccctggggtgcgagccagctccaggctctatcgcttctgattaaacaggtgatgagttaattttagtgaagccagtgtcaggagcatgcacaagctttgatagccgagcgaggcacactttaccctcaacgggagtaaacacatgcgccatgtgtaattac

SEQ ID NO: 250 - DNA, 534 bp, Unknown
  GENOME_ACESSION: IMG_3300000938_$F_3300000938 JGI
aaaactcggtatcgtcaaccacgctttgataaccggaaacgccctacagggtggctcccacccagtctgcaaagccgagttgagaatatcgtaacttgggttcgtaggttacaaaagctagctttgatttctgatatttctcaggaattagtcaagtttgatactcaactcatggagaatccagacatcagtggattcgcataccaacaaggtgagttagctggttacgaagtgcgagaatttctgcttttcaaattcaatcatacctgtatgtactgtggggctaaagatactcgtttggagattgagcatcttttacccaagtctaaaggtggttcaaatagaattagtaatttaggcattgcttgtaggaattgcaaccaaaaaaaaggccgtcaagctctcagagaatttttagcccaaaaacctgacttgttacagcgcattctgagacaagtaaaacaacagaaagccgacactgctgccgttaattctacccgttgggcattatttaatcgactcaaagagactgga

SEQ ID NO: 251 - DNA, 257 bp, Unknown
  GENOME_ACESSION: IMG_3300000938_$F_3300000938 JGI
  MISC_FEATURE (216)..(257): Any "n" represents any nucleotide
gctatccgcgaaccactggacaaacctggacaatcccgataaatccttggtagagatagcccggttaagtctaaccacagactacgttaagaaggtcacgacaccctgtgagtgcttgccagctccttgctctgtcgctaccagttaaacatctttatttcgctaaggaagtgctgctagcatgacaagccctcttaacattaccaaggcaaaagnnnnnnnnnnnnnnnnnnnnnnnnnnnnnnnnnnnnnnnnnn

SEQ ID NO: 252 - DNA, 1377 bp, Unknown
  Ga0172380_10006798 JGI
atgcagaagtttaaagcaaagttaaagaacgtacctacaaatgcttcactagtttgtagctctacaaacacacaattaaacagagacgacagtcttagtgttgtgagtggtcaagaaattgacaaactgactttaaacaatcccgaagtgaatcaaccggaggaaactccgggacaggagttgagactacctgtcaaagtttttgtattgaatcttaggggcaagcccctgatgccttgctcatgccgacaggcaaagtgtctcttaaaagagaaaaaggcaaaagtagttaaaaggagtcctttcacattacagttgttagttgcaacaggtgaaacaaaacaagatattgttttaggaatggattcaggttattcaaatgttggaatttcctgtgttactaaaaaacaggaattattgagattgatttgtgttttagaaaatggaatgagtaaaaggcttgaagaaaaagcaatgtacagacgcggcagaagaaataaattgtggtatcgtaaaccgcggtttatgaatagggtttcaactaagaaaaaaggatggttaccgccttcaacactaagacgttttgaaacacatataaggcttattgaaagtattaaaaaacttttaccaataacaactgttagaattgaagtgggtaattttgatattcagaaaataaacaatcctgaaatttcaggaaaagattaccagcaaggttcgatgtatgaatatcaaaacaaacgaaattatttaatgagccgtgaaaatggaaagtgtcaattttgtggaaaagattttaaaggtcagtcgagtcatatacaccatataacaccacgaagtaaaggaggtactgacaaaactaacaatctggcaatcttacataaaaaatgtcatgaagaacttcacgccaaacatttagaaaaaacactgaaaaaaaataaacagttcaaagatgcgacatttatgaatattattcaacataaatttcaagaagtgttagattgtgaaatcacttttgggtatgagactttcataaaaagaaaggagttaggaattttgaaatcacattcaaatgatgcttttgtaattgcaaacgatactaataataaaagggttaaagaaattcaagtaatccagaagaagaaaaataatagatgtttacaattaaatagaaagggttttaagccaagcataaggaaagaaaaatctaaaataagtccacatgatttattttggattggtaaaaaacagtatacttgtaaaggtatgcacagttatggtagatatgttctttggggggatataagaaaaaaagaatatgttagattttcagatgtaactaaaatatttcgtgttagtggtttagtatggatataa

SEQ ID NO: 253 - DNA, 264 bp, Unknown
  Ga0172380_10006798 JGI
gtcaactaccccttaacaagttaaggggcttgtccggtaacggacagagcaaaagttgattagggagcgttttaaaaaaatgcagaagtttaaagcaaagttaaagaacgtacctacaaatgcttcactagtttgtagctctacaaacacacaattaaacagagacgacagtcttagtgttgtgagtggtcaagaaattgacaaactgactttaaacaatcccgaagtgaatcaaccggaggaaactccgggacaggagttgag

SEQ ID NO: 254 - DNA, 462 bp, Unknown
  Ga0114359_1005163 JGI
atgcgaagaggacgtagaggaagacggattaaccgccaacttccttttaatctaagagcgcatcgacaaaaacgattttcaaatagaagaacaggaaaattagctccctcaatcagagctaatcgtcaacttgaacttcgagtcgtttctgaactaaccaaaatctatccaattactgacatttactttgagtatgtcaaaaccgatattgatctaacttccagtagaaaaggagctaagtctggaaaaggtttctcgccagttatggtcagacagaaatgggcgattgagcaactatctcaattggcaaaagtccatactcgctttggttggcaaacctctaatctcagaaaatatttgcgactagaaaaatccaaaaataaagcaaaacaatcaccagaaagtcatgctaacgatggcattgctaagagggagggagcatctcacctttgtaacccctaa

SEQ ID NO: 255 - DNA, 112 bp, Unknown
  Ga0114359_1005163 JGI
gtcactaaccccgccctaaaagggacggggcttgcctagcttaatgcgaagaggacgtagaggaagacggattaaccgccaacttccttttaatctaagagcgcatcgacaa

SEQ ID NO: 256 - DNA, 873 bp, Unknown
  Ga0394881_0010240 JGI
atgtctaattttgtctttgttgtcgatactaatggacaaccgcttaacccagtaccaccgggacaagcaaggcgattgttaaaacttcaaaaagctgctatttatcgacgttaccccttgacgctcgtactcaaatacacagtatccgctccccaaatacaaccccatcaattaaaaatcgatccgggtgccaaagttagtggattagcaattgtccgagacgacaaagtaatctggggtgctgaattaacccacaggggacaacaaattaagcacgataacgaagccaagggaaatcaggaacttaaagatttcttagcacagcaacctgagttgttcgagcgaatcgcaaaacaagccaaacaaccattgaaagatgcagcagcagtcaatagcacccgctggcaactctttaacagactgaaagaaacatcattaccagttgaaatcggaacaggcggtcagaccaaatacaatcgtactcgattggaattaccaaaaactcattggttagatgcagcttgtgtgggactcgtgtcccaattaaaaattttgactgccgggcctttgttaattcaagcttcaggatggggtagccgtcagatctgccagccaaataaatatggcttcccaatcagacacaagacacggtgcaaggaatttttcggctttaaaactggcgacatggtacaagcaactctgcctacaggaaaatttgcgggtactcatagaggcaggctaattgttcgagcgagtggagtttttgagatgatttcaccaacgggaaaagttagcccagtacgtcacaaatactgtagggcaattcaccataatgatggttatacgtatacattgtccacttgcgtccagtaa

SEQ ID NO: 257 - DNA, 242 bp, Unknown
  Ga0394881_0010240 JGI
gctatccaccaaacagcagacaagagtggacaaccacttccaacgctcgagagatagccagcctcagttacaaactacgtttcgagggtcatgacacctacaggtgctttccagcttgtagccctgtcgtcaatagttaaacatccctatttggttaaggaagtgcgattggcatcacaagccctcaaaacattggcgaggaaaacattaccccgcaagggaggacatccatgtctaatttt

SEQ ID NO: 258 - DNA, 1242 bp, Erysipelotrichaceae bacterium SG0102
atgacaagctatgcttttgtattggatgctgataataaacaattagcgccaaccaaagaacagaaggcttggtttcttattcgtaagaaacgagcaacattgctcagcagatatccaatggtaatacaactcaaaaagaaaatttcagatcaagaaatctgcaaagatgaaattcgttgtggaatagatgacggaggtcttcatgttggtgtcgcattagtacagaaatgtcagacgcgaaacaaagtcatttttaaaggaactattgaacagcgtaatgatgtaaaacatcttatggacgttagacgtggatttaggcgttatcaccgtgatcataaaagatatagaccagtgagatttgacaacagaaaatcctctaaacgaaaagggagaattgcaccaagtattttacaaaaacgtcaatcaacaataagagttatcaatcaacttaacaaatgggtaaatataacgaattattggttagaagatgttgctattgatataagagcattgacagatggctataaaccatatcggtggcaatatcaaaaatcaaatagactggacgagaatatccgtaaagctgtcattttacgagacggttgccaatgtatggaatgtggaaaatctaattgtagattagaggttcatcacattaagccaagaagactgaaaggttcaaatacgcttggtaatcttattacgttatgtacaggatgtcaccagaaaacagaaggtgtagaagaattatacatgaacagatacttcgctttgttaaattcttctgacaataagaacctgaattatgcacagcatgtaatgataggtaaaaaatggctgagaaaacagttatcaaatttaggaatgttacatttaaccaacggaggtgatacagccaataagcgtattgactggggtattgcaaaatcacattctaatgatgccatctgtatcacagacttgcggccagacacatgtgaaatcaaagaatgggtaataaaacctatgcgaagacaaagtaaggctaagacagataatgttcttggaattaaacatagggatttggttgagtacacttttatgaacggtgaaacacatagagggtatgtaacagctttatatccagaacaaaacgttcttaattttcaaagtccaacaaaacattgcaagaaagttaacgcaagaaaatgcaaagtgctttggaaatattctaagatttattggttagataatgttagttag

SEQ ID NO: 259 - DNA, 289 bp, Erysipelotrichaceae bacterium SG0102
tacgtaaacatagacaggagtggacacattaagtctcttgtctatggcttaacaataggtttcgagcctaagtgactgctgctatcgaaagatatgttgcagatatgaactacattaagcagtaaggtaaagacacacctttagatgtaatcttcagtctgaagctctgtgagtgcaaaccaagaaacaatgctaatgtcctgcattgataacagggaaacacatgtcctctactcgatattggcacgaagagaaatactccgaaaggaaggtgtcagaaatgacaagc

SEQ ID NO: 260 - DNA, 753 bp, Unknown
  Ga0247609_10038159 JGI
atgacaagttactcatttgtgttggatgctgatggtaaaccgttaagtccaacgaaagaaacaaaagcgtggtatatgatacgtaaaggtaaagccaaactcgtatcaaaatacccaatggtagtacaactgaatcggataatccctactgatgaaatctgtaaagatgaagttcgtggcggaattgatgacggtggtttgcatacgggtattgctgtcgtacagaaatgtcaaacaagaaataaagttttatttaagggtactattgaacagcgtaatgatgtgaaaaatcttatggatgttcgtagaggttatcgcagataccacagacagcataaaaggtatcgtgaagcaagatttgataaccgaaattcaactaaacgacaaggcagaatatctccaagtatcttacaaaagcgacaagccacaatgcgagtgatatatcatttgaataaatggataaatataacaacttattggcttgaagatgttgcaatagatataagagcattaacggatgattacaagccttatagctggcaatatcaaaaatctaatcgtttagatgaaaatatacgtaaagcggtaatacttcgtgatggatgtaaatgtatggaatgcggaaagaaaaatatcaaactcgaagtacatcatataaatccacgcagaaagaatggctctaatacgttaggaaatctgataactctttgtgaaaagtgtcatcaaaaaacggaaggtaaagaagaacaatat

SEQ ID NO: 261 - DNA, 291 bp, Unknown
  Ga0247609_10038159 JGI
tagtcaaacatactcaaaagtggacacgattaagccttttgagtgtggacttagcagtaggtttcgagcctcagtgagtgctgacagtgaaaactgttctgcacgatgaactacgatagagaagtaaggtaaagatacacctgcggatgtactttcagtctgctgctctgtgagtgccaaccaagaaacaccgctaatgtcctgtggtgataacagggaaacacacgaccttctttctgtcattggcacgaaggaaaattctccgaaaggaaggtttcagaaatgacaagt

SEQ ID NO: 262 - DNA, 1305 bp, Pseudomonas sp. OV081
atggcggtctacgtgttggacaagcaagggcatccactgatgccgtgcagcgaaaaacgggccaggctgcttctggagcgtggtcgtgcacgtgtacatcgccagatgccgtttgtgatccggctgactgaccgcctgcagaccgaatcgcagtaccagccgctgtcgatcaagatcgatcctggcagcaaattcactgggatcgccgttgttcgccagcgggacaagcaggtctttgtcctgtcgctgatcgaattggtacatcgtggcgccatgatccaaaagacattgctgcaacgcgccggctatcgccgtggacgtcgcagcaggaacctgcgctaccgggcgccgcgcttcaataaccgtacccgcaaggccagttggctggcgccgagcttgcagcatcgggtggacaccacgatgagctgggtgcagcgcctgcgccgctgggcgccggtgactgatctggctgtggagcgagtaaaatttgatatgcagctgatgcaaaaccctgaagtcgcgggtgttgagtatcagcggggtgcgcttcaaggctatgaggttcgggaatacctgttagagaagtggggtcgcctttgcatgtattgcaacactcctaacgtcccactacagatcgagcacattcttgccagagccaacggcggcagcgaccgcgcttcaaacttgggcctggcctgcgacccatgcaatcaacgcaaaggaaagctgctgatcgaagtgtttttgaagaaaaatccagaattgctgaagcatattttggccagagctaagactacattacgcgatgcggcggcggtgaactccacacgcaacgctatattcgcatctctgtcagagaccggcctgccggtcgaggcaggtacaggaggtcagacaaaattcaaccgctgcacctatggcttgccaaaaacacatgcgctcgatgctgtctgtgttggggatatctcaggggttaaaaactggaaaattccgacacttgccgtcaaagcgatgggacgtggaaattatcaacgaacgcgggttttcggcagtggctttcctagaggatatctaacacggcagaaacggcattttggtttccaaacgggtgacatggtgaaagcaaacgtaaccagaggtaaaaaaatgggcatttaccaggggcgcattgcagtgagagcaactggaaaattcaacatccaacttcatgatcgtgttgttcaaggaatcaaccacaagtattgcgcaatcgtccaaagggcggatggctacggttaccagcaaataaatacagaagcttattaa

SEQ ID NO: 263 - DNA, 293 bp, Pseudomonas sp. OV081
gtcaactaccccgccctgaaggacggggcttgctgaggaatcggtgagtcgggttgaccagggggccgagattttttcggcagatgtttgcaacaggtcgttgagacccactccggaatgcttcctcagttccggacactggaaattctagatcacgctggcgaaaggtaaagcgccgaaggttttggatgccgcgcaagcgggagccggttgcaaactccccgaggggagcgaggcctaaaaacctccgtcactaggcccgtaagggcataaattaggaggatcgcatggcg

SEQ ID NO: 264 - DNA, 585 bp, Unknown
  Ga0307373_10033165 JGI
atgcaacatgttttggcgctggatgcccagcagcgtccactcgcgcactgccgcccggcccgcgcgcggctgttgctcacccagcgcaaggccgccgtcgttcggcgttaccccttcaccatccgcctgaagcaggcgttgccagcggcgtcttcgccgctgctccggctcaaactggatccagggagcaagacgaccggcttcgcggtggtcaacgacgtcaccgggcaggtggtgtttgccgcctcgaatcgggtgagcaatctcacgctcgcctgccatccctgtaacacggccaaaggcgcccagacagcggcggagtttggtcatccgaaggtccaggcgcaggccagcgccccgctcaaagacgctgccgctgtcaataccgcgcgctgggcgctctatcaccgcctcaaggcgggcgtgtatgtgggacggctagcggtgcgagcaaccggatcgtgcaacctcaagacggcgacagggacgattcaaggcatccatgtccgctattgtcagccgctccagcggggagatggctatgcctatgcgaaagggggcgcggcgttgcttccccacgcctga

SEQ ID NO: 265 - DNA, 295 bp, Unknown
  Ga0307373_10033165 JGI
atcaacgacttcacgcagcagcggcaatagctgaccagtccccttgccgtctcggcggcagggagccgttcacgaggagcgcccaagctcctaccctgggatagcatctcagtcccaggccctagaatgctcaggttaaacagagacgtggggtatgaaactcagtgcttgagcaagatggccgctcgtgagccgggacgagggaacccttacctgcgcaagcagcgtcgccgcgtacggcgccccctcacgggggatagcacagacaagaaagcgacccgacacgatgcaacat

SEQ ID NO: 266 - DNA, 282 bp, Unknown
  Ga0118725_1008328 | JGI
atgcaaaaagtatttgttttggatacaaagaagcgtccccttgcacctactcatcctgcgcgggcaagacaattacttaaaaaagggaaagctggtatttatattggaaccgtggcaattagaacttctggcagttttaatctcaagaccgacaacggcacaatacaaggtatcagttatcggtactgtcatttacttcaacgtgctgatgggtacaactaccaaaaaggaggaacggcacttcctcccaccccattcaatggggtgggtttccgtgcctaa

SEQ ID NO: 267 - DNA, 333 bp, Unknown
  Ga0118725_1008328 | JGI
gtcaactaccctaccccttgaaggggtagggcttgtggctttgcgcggttacttcgtgaaccgcttagcaactcaagcccggagttgaccagctttagtcccgagaatcgggactccgttaggggtgaatatataggtaccgtcgcgatgcttcaccagtccgacgctctacggcaagtcgttaaacgagcatacgggtagaagccggtgcggcttgcatcttactgaacgatatttactttaggattcaaaaccacccactaacattggcaaggtgactgttactggaacttaggttctacgactgaaaggagactttcaccaatgcaaaaa

SEQ ID NO: 268 - DNA, 1365 bp, Unknown
  Ga0247841_10001800 JGI
gtggctctgtggtctgtcattaaaagttctgagggtaggaacggtgtggcagacttaaaaaccttttccaacaacctcgatgcgtctctaactctgaaaggagaacgtaacttgagagtatacgttgttaatttaagaaacgaacctttaatgccaactactccacgaaaagcaaaaatcctgcttaaaagtggcgaagcatcggtattcaaaagaactccgttcaccatacagttgctacatgctagtggcgaaacaaaacaacctataacattaggtgttgatagtggatttcagaatgttggattatctgttataacagaaaaagaagaagtctttagtgcagaagttaagttgagaacagatatagtaaaactaaattcggagaaaaggcagtatcgcagggcaaggcgtaatcgcaagacttggcatcgtgagccaagattccttaatcgcaaaaaggatagtggttggttagcgccttctatacaacacaaattagattctcatatcaggttgatagatatggtaaagaagatattgccgataaccaagataaatattgaagttgccaattttgacatacagaagataaagaatcaagacatagaaggaacagattatcaaaatggagaacagtgtggcttctggaacgttcgtgagtatgtattgcatcgtgatggtcatatctgtcagcattgcagaggtaaatcgggtgataaaatcctagaagttcatcatataaacaccagacaaacaggtggagatagaccagataacttaataaccttatgtggtttatgccatgagaaagtatcacaaaataagttacaactcaaaatcaaagctagtaaaggatataaagccgaatcgtttatgtcaatggttagatggcgcttggttaatattataagagacattggagatattgtgtctcatacttatgggtatataaccaaagggaatcgaatagcactaggtataagcaaatctcatgctaatgatgcttttgtgatttcgggaggtactaatcagatacgtcttaatggttatttaatccaacaagtgcgaaagtgcaaccgcaaactctataaaggcatacgaagtcacatcaagaatacagccactagattcattaggggattccaacgttttgataaggtattgtggaaaggtgtattccctactcggcggagcagaggtgttgagtgtttcatatttggtcgtagaacatcgggctattttgacataagaagacttgatagcacgaaattaagtcaatcagttaaatatacggaattacgactattagagacatttagaacattttcactagaaaggagagtggcagactttcccgaataa

SEQ ID NO: 269 - DNA, 253 bp, Unknown
  Ga0247841_10001800 JGI
ccatgatttgtgggtaaagattagcataaatgcggaggcttgcaaaagccttgattgactagagggtgtttaattacacagaagttggttaagagaaatacatacacacctacgaatattacgcaagtttgtggctctgtggtctgtcattaaaagttctgagggtaggaacggtgtggcagacttaaaaaccttttccaacaacctcgatgcgtctctaactctgaaaggagaacgtaacttgagagtatac

SEQ ID NO: 270 - DNA, 1299 bp, Unknown
  Ga0194121_10011106 JGI
atgttagtgtacgttttgaacaaagaaggagagcctttaatgccctgtagcccttgtaaagcaagaaaactcctggcatccggaaaagcaaaagttgtcaaccgagagccttttaccattaaacttatgtttggttcatccggatataagcaaaaggtcactgtcgggtgtgatagcggttcgaaagtagctgcttttgcagcaacggtgagtaacaaaaccctttacgtatcggaggttaaattaagacaagatattagatccaacatggaccaaaggcgatcttttagaaggatgagaaggtctagaaaaactcgttatagaaagcctcgtttcaacaatagaaaaagggatggatggttgacgcctacagtgcaaagcaaagtaaactctcacaaaagggaactggcttacattaaaaaacttattcccgtacacaaaatcattattgaaaccgcaagtttcgatattcacaaaatcacaaatccagaggtctcctcttgtggttatcaagaaggaagacttaaggacttctataatgtaaaacactatgtattacatagggatcatcacacctgccaacaatgcaaaaaaacaaagcttgcgctgcatgtgcatcacattatttttagatctaatggaggaagcagctctccggacaaccttattacactttgtaaaaactgtcatgagactctacacggttcctctcaagctgaactgctctccaaaaaactcttcacaaaacttaaaagcaagcctacccttgatgccacgcaagtggctaccattggctcttttttgaaaaaagaggtagtatgcgaggaaacttttggttatgaaacaaaatacaaaagagagtccctaggcctgcaaaaaactcactaccatgatgcaatttgcattgcaatcaagcaagggcaacctatgcagattggggtgcctcttttaaaaaaagtacacatagctcaaggagattacaagctttgctcaggagatagatcagagaaaatccttcctacagggaaggttatggggattaagaaatttgacaaagtaaattctaatggggtaactgcttttgtcaaaggtagaatgtcgacaggttatgctatccttatggatatcgagggtcataagctaaatattaaacccatccccaagcttaaagaattaaaacgcgttgctgcaagaaaatcatgccttacaagtcttgttcccatcgaaaatatcttcttaggtaccacatcatcttggtcacaaaatacagaaaaccactcttttgcaatgagtccataa

SEQ ID NO: 271 - DNA, 306 bp, Unknown
  Ga0194121_10011106 JGI
gtgaagctcccctagactaaagatctaggggcttcttagaaactaggaagcctacttcacaagaacacaaacaaaaggaagtaaaacaatgtttgtaaacgatagaacagaaaatataggcacttcaggatgccgactcagtcctgaactctgcgaattgcagttaaacagtcctgagggaagggacagtgctgcaattgtcaaacctgtttatatccgttcgagagtaagtcagaaaaagcatggccatccttgggtctgctttcttatgcataaccctagttcaagggggtgcactttatgtta

SEQ ID NO: 272 - DNA, 441 bp, Unknown
  GENOME_ACESSION: ElkSloMetagenome_4_$F_3300000354 JGI
atgaaagtctacgttataaacaaacatgggcgtcccttgatgcccacaactcctagaaaagctagattgttactcaaaaatggtcaagccaaaatcgttggacgtgacccgttcactatccagttaatttatggctcctctgggtacactcaacctgtggacaaagggaagcgtcgggaattagagatagaaaaatctcaccataatgatgcttatgtcattgctggtgggatgactcagccccgtgtactcaagcctttgatgcaacatgacttagttctgtttgagggacgaatttatcctgttgtcggagtccaaaatttgggaactcgcctcagtttaaagccagagccaggatgcaaaaccaagtataaaactgcggcaatgaacaaggttaaacctttaaaaacaagaggaggaatctgtgagcaacaagcataa

SEQ ID NO: 273 - DNA, 319 bp, Unknown
  GENOME_ACESSION: ElkSloMetagenome_4_$F_3300000354 JGI
ccgtcacgaacccaacgctgaccgatacgagcggtacagcgtgggcttgagagaaatcttaagccctcgtgattagcctcagtattccgacgaaagcaaggaatactacgttgatcggaaatacataggcaccgtgaagtacagggttggcaacccgtttcctagcttcacgccctgcggttttcattaaacattcctattgggtagggaaagtgtgaaaacatcaacatctcgactccgctcgatgttgaaactccgatgaacattggcgcaggaaaccacaccgcaaggtgaaaacctacttgttaggtctatgaaa

SEQ ID NO: 274 - DNA, 1275 bp, Museum specimen metagenome
gtgtgccaaggtgacaacttatttcaacattggcgaagggaatctacgggagttatcccgaattacatttttaaaaataacaaaatggtttatgtgttagacaagtctggaaaacctatgatgccgacaaagcggtatggctgggtacgtcgtgctttgcgtgatggacgcgctaaggtagtcagacgtgatccttttacgatccaattaacctacgagccggacacacacgtgttgcaagacactacgcttggtattgacattggctatgagaacgtaggtacaagtgtgctaacaaaacaaaaggaattgtttagcggcaattttaagctacggacagacatccaaaagcgtttgtcatatcgtaggatgtacagacgaactagacgaggacgaaagacgcgttatagaaaagctcgttttttgaatcgcaaaaagtattatgccgacgctccgagcgtaagacacaaggtacatagccacgtaagaatcattaatctgataacatcaattttgccggtcaatcaattgattgtcgaggttgccaattttgatgcacaaaagattaagaatccagacattcagggtgaagaatatcaacaaggttgtcaattaggctatcagaatgtcaaggagtatgtaaagagtcgagattgtcaccgttgctactttaacacaggcaagtgtagcaaaaagctagaagtacatcacattgtattcaaaagtcaaggcggatcggatgctccaagtaatttgattactgtttgtgataagtgccataagtctattcacgatggtaaaaagccaaacccaaaagctagtaaatacaaatcactaagacctattagctttatgaaaacagtatctaagcgtctacaagaaatgctaccagacattgagtatacctatggttaccagacaaagcaaaaacggtataatctcaatctcggaaagtcacacgtaaatgatgcttttgtaattgcaaatggtacaagtcaggttcgatgtaagacaacgaattatgttttcaaaagaaaaaataacagacaattgggtaagctaagaaaaggctttgctccatcgagtagaaagcaacgttatccgatacaacctaaagatttagttgagtacgaaggaaaaaagtattatgctattggcacacattgtaaaggtaaaagagtgattgtgatgtacaacggcaaaaaaaaatcaatagcaattaagataataaaattattatttaaccaacgaagtttgttagccctcacgggctga

SEQ ID NO: 275 - DNA, 248 bp, Museum specimen metagenome
atccacaccaagcgctaatgcgctatggaatgggtttgaaaaaacctggttgattagcctaagtcttaactgactacgttgaaataattatcataccctaggatgcttcccaagtcttaggctctatggttgagtattaaaagttctgatgggtaggaacggtgtgccaaggtgacaacttatttcaacattggcgaagggaatctacgggagttatcccgaattacatttttaaaaataacaaaatg

SEQ ID NO: 276 - DNA, 1338 bp, Unknown
  Ga0170573_10661034 JGI
atgttagtctttgttctaaacaaaaatgcacaaccgttaatgccctgcgctccgcgcaaggcgagactgttgttgcgaaatggagaagcaaaagttgtaaacagaactccgttcgtgattaagttaaatttcggctcctctggatatacccaaccagtaggtttaagtttggacacaggggctaaaaatgcgggatttgccgcgacagcgaatggaaaggttttgtacacaagtgaggtaaagctgcgtacagacattccagaaaaaatgaagcaaagattatcgttcaggcgaactcgtcgcggacgcaatacacgctacagagcgtcgcgatttgataatcgctctagactggaggggtggctctctccaacgatgacttcaaaggttaattctcatgttcgagaaattaattttattaagaaaataatgccagtgaaatcaatggtcgctgagattgcgcaatttgatattcacaaaatcacaaatccagaagttgtaaatgacttaactgggaaaagttatcaaactggccgacaaaaggatttctataacacgaaggcttttattttatcgagagataattacgagtgtaaaaaatgctgcggcaagaaaaataacccaaaactccacgttcatcatattattttttgttcaaatggcgggacaaattcgccagacaatttaattacgctttgcgaaccgtgccataacgggattcatgcacacaagaccccagaaaaagaatcattaaaattttcaacagaaatcaagaagcaaagacacaccgcaagtgccgttcaagtttcaacggtcagttcgtatctgcaaaaaatatatccagaaatgaaattaacctacggatacgagacaaaatttaagagagagatttttggcgctaaaaaggaacattataatgacgcaatttttgctggacttgttgaaggtgaaatttgcgaaatgccaaaatcatattttaaaaaagttcatatcgcaaatggcgattacaaattaagaaatggcaaccactctgaacaagtaattccaactggaaaaattatgggatttaagaagttcgataagattgagtatctaggagaaaagtattttattaaaggtcgaatgtcgacagggtatgcaattttaatgaacgaaaaacacgaaactgtaaaattaaaaccgataccaaagttttcaaaaatgaaaagaatttctgcgaggaagtcgtgccttacaagtcagattgtcatcggaaattcactctcaaatatcacattatcttcgtctgcaaatacagaaaaaatctccttgcaagaaaagaagttggtgaatttatga

SEQ ID NO: 277 - DNA, 321 bp, Unknown
  Ga0170573_10661034 JGI
gtgaaggctccgctaagctaaagacttagcggcttctataggaggcggaatttatttcgcctcagaccaagaagtacttcacaagaacaacaacagaagggttgagagaatgttgttaaacgatagaacagaaataggcactttgggatgtcgacttagtcccgaacaatgcgaatgcaagttaaacaacgataagagtaatcgcagtgcttgcattgttaaacctgttcatatcagttcgaaagtaagccgtgcaaaaacaaaattccttggtttgtttagtgcgcactactcgagtttagcgaggaagactttatgtta

SEQ ID NO: 278 - DNA, 951 bp, Beggiatoa sp. 4572_84
atgttagtctatgtcattaataaaaatggtaatccattaatgccttgcaaaccagcaaaagcgaggaaacttttgcgcgctggaaaagccaaaatcgttaatcgttgtcccttcaccattcaattgcaatgggactgtgaagaaaatgtgcaacccgttacgttggggattgataaaggaagtcattacaccggtttgtgcagtgtgggttttggtcaaattttactttctggcattattaatcatcgcaccgatattaaagacaaaatgaccgcacgacgtggtaatcgctgtcaaagacgttatcgtaaatggtatcgtcccaaacgatttttaaatcgtgcaactagtaagcacagcggacgattacagccttctattaaagctaatgcagaagaggtaataagggttgtgcgtcaaattcctttgcccctcagtcaaattgtgattgaagatgtgcaagttgatattgctcgtctcaacaatcctgatttgcttgggattgagtatcaacgatctaatcgtttagatgaaaatcttcggatagccacattgatgcgagataaatatcaatgtatctcttgcggaaaaaaaaaggttcaacttcaagcacatcacatagtgcctcaaaatcaaggcggtaaggatacgattaaaaacttaataacgctttgtcaatcctgtcataataaagtacatcaaggccaaatcactcttcatgctgatggcataagtggttttaaagaccagatagcccaaagaaccatgcaaggaaaatcttttatttaccaaattttagaaaactttgccccggttttcaaagtgtttggttaccaaaccgcttcgtttagaaaatatttaagcttacctaaagaacatgatgttgatgctctttgtgtggcaaccttagataaaggaacaaaagtgcctctctttgtgtggcaaccttag

SEQ ID NO: 279 - DNA, 264 bp, Beggiatoa sp. 4572_84
atcataatagttcctaaatctatagaataatgttctaaatatagaaatttattcctagacatggaactaacagtgggctacttgaatgagtcgcagaagttagataggccatcacaccttccgatgtgattccagtcggtcgctctgtggtctagtattaagggtagcggaaacgtgaaagtgtgctaaacgtaaaaaacctatttaacaaccacaaggagtacctcactctcactaacaggaggtcctaaagatattatgtta

SEQ ID NO: 280 - DNA, 1050 bp, Groundwater metagenome
atggctgtattcgtactggacaagcacaagaaaccactaatgccctgcactgaaaaacgggctaggctgttactcgaacgcagacgtgcggtggtgcacaagatgtcgccttttactatccggctcaaagaccggacggtagaacaaagccaacttcaaccgttacgtctgaagttagatccaggtagcaaaactaccggtatcagcatcttacaagaagcagtgtccgagaaagcagatgtcgtctttttggcggagctgcgccacaagccgggcatcaaagagaagctggccgacagaaagacacagcggcggaatcgtcgcaaccgcaaaacacgctaccgcgagaaacggtttgataatcgtaccaggccaagcggctggctgccgccgtcgcttcaagcccgggttaatcaggtcgagaataccgtaaacaaattgcaaaagctgttgcccataaccgcaatcagcaccgaacatgccaaattcgacacacaacttatgcaaaaccctgccattgccggtatcgagtaccagcaaggcgaacttttaggttacgaggttcgggaatatctattagaaaaatggaaacacaaatgcgcctactgccgtaccgccgacacaccgctggaaatagagcacattacccccaaatcaaggggcggcagtgacagaatcagcaacctaacattagcctgtcgcccgtgcaaccaagccaagggcaacaggacggcagaagagtttggccaccctgaaatccaaaagcaggccaaattgccgttaaaagacgcggccatgatgaacgccacgcggtgggcattgtttaacaggctaaaagaaactggcctcccggtcgagtgcggtactggcgccagaaccaagaaacagcgtatagaacataaactcccgaaaacccattactacgatgcgtgttgcgtgggtgccggcaccccggcaaatcttgcgatcaggcaaaagtatgtttccatttggaaagcgatcggcagaggcaccaggaggatgtgcaacacagacaaatatggttttccg

SEQ ID NO: 281 - DNA, 265 bp, Groundwater metagenome
gtcatagaccccacggctaaagccgggggcttagcatttgccccactatgaccagcctaagtcccacgaggactacgtttacttagccatgacaccctggggtgcttctccagctccaggcactgtcgtccggactaaacagcgagtaggggttgtacgagcagtgccccggacgcgacaagctaagctaacattggcgaggagagactaaaaatagcgttaccggccccttaaggggctccgaaaggagagaaaaagatggctg

SEQ ID NO: 282 - DNA, 1167 bp, Unknown
  Ga0315276_10000018 JGI
ttgactagacagtttgtaactgaactcactggacgtggcagtccaaaagacgtagaggatgcttccctagtcttcttcctctctgtgagtcagtgtcgaagggacgtacaaacgagtttttcaaggttctcggcttactgcaacaaaaaccttgagttgaggagttcaataaagatgtttgttcctgttactgacaagaatcataaacccttgatgtcgactactccttcaagagcgaggaagtggataaagacaggcaaagcgacaccgtattggagcaaccaaattttctgtgttcggttgaatcaagaaccaagtgacgacaagaagcaaaagattgtgatgggtatcgacacgggcagcaaaagagaggcattcacgatcaagtcacagggtcatacatatctgaacattcttgctgatgcggtgacttgggttaaagatgctattaaaataagaagaggagcaaggcaggtaagacgtcaaagaaaaacgccataccgtcaatgtagatctaacagatcaaagagagaaattgcaccttcaataatatcaagatggcaactgaaattaagaatcatcaacagaatgatgcgtatctttccaatcacagattttgttgttgaagacatcaaagctgaaacaaagaaaggaaagagacgttggaacaaatctttttcgcctcttgaaattggaaagaagtggttctataatgaacttaggaaatttggtaatcttgagacacgacagggatatgaaacaaaggaactacgtgatacatggttattgaataaaacagagtcaaagatgtcattgtcatttgattctcataatgttgattcttgggttcttgctaattatcttgttggaggtcatattaaaccagataacaaagaaatcaaaaggatgataccaattcagtttcatcgaagacaattacatcgatttaagattgaaaaaggaggtgaaaggaaacgatatggcggtacgatgagtttgggatttaagaaaggaagtttggttaagaataagaagcatggtatttgttatatcggtggaaattcatatggtaaattgagtcttcattctcttaaaacaggaaagagactatgtcaaggagctaaaattgaagaaataaaatttttaacatattgtagttttagatga

SEQ ID NO: 283 - DNA, 335 bp, Unknown
  Ga0315276_10000018 JGI
gtcactcatgagcccgggcagcgcatggaggtgaatgacgtcaaggacctggccaagcagctcgtgcggacactcggtgacaagaaccagatcctacgcaacgcgaagatcacgaaggacaacatcgcacagctcgtcaaggcggtgaaggaggagaagcgcttcgcggtggtcaacaaaaagcgcgtccttgttgaccgagctgacgcggtactgaacagccttcgcgagatgtacccggaacttgttatatgagatgcatattaaaacttattttaaaagaaagatgtaccctgaggtcaattacctagggtatttttttaggcacaaagaaa

SEQ ID NO: 284 - DNA, 1362 bp, Unknown
  Ga0117909_1048905 JGI
atgcgtgtgtatgtaataaacaaaaacggtaacccacttatgccctgcaaaccagccaaagcaaggcatcttctacgggacggcaaggcaaaatttgtcaatcgaaaaccattcacaattcagttactttgggattgctcagaaaatgtgcaagacgttcgttgtggtattgacaagggatgcatggtaacgggtgttgcttgcgtaggtaatggagaaatcctgttctctgccaatatcaaacacagaaatccggtagcattacaacaaaaagacggttcaacgaaaacatttatacaagtgagagcagaaaggcgcaaaagtcgtagacatcgccacaaatggtatagaaaaccaagattcaataatagagcatcatcaaaaagatctggtaggttgccaccgaccattaagatgaatgtcatggaagttgtcagggttataaagaaaattcctttgccaatctcccatattaccgttgaagatgtccaggtggatattaggagattaagtacccctgacgtggaaggtagtaagtaccagcaatctaatcggctagatgagaatttaagacttgcttgtttaatcagggataattttacttgtcagaaatgtggaaaaaagaatacccgattggaagctcatcatgtaatttggactgctaaaggcggaaaagatagtatttacaatttgattactctttgtgaggattgtcatgagaaagtacaccaaacaggggaaagtagcaaagtcaagctcaaaagaaacaaagtagtaactggcatggatggattcaaggataagatagctgcccgaacaatgcaagggaaaactttgatgtatcaagaactggaaaagattgcgccgctgtcttgtgtatacggttatcagacttctgaatttagaaaagcattagatttacctaaagagcattggatagatgctatttgtgttgcctatttagaaaccggtgagattgttccattagatagtaataatcattattctatatggtttcgggctaaacaaaccagacgcatttttgacacgcaaccatcaaaaggtggaatgataaagcagtggcaaaagtacaaaggattagcaagtaatggcaaagattgtattttagtagacaaacggactaaaaacgttgttttaccagaaggctataccctttaccaaaaaggcgatgttattgacattttaggtttacagactgaaatagcttctatcaatggaaagggcaaaaggttttattattggatatatcagcctgatggaactagaaagtatgcttctgtatcccataagaaagtcaggttggtagaatatgctaagacactcatactatatctcaagtaa

SEQ ID NO: 285 - DNA, 303 bp, Unknown
  Ga0117909_1048905 JGI
gtcaacaacccctcctgattcacagaatcagaaggggcttgctgaataactcggtaagccctgggttagaccagtccccttcatccttgactttgatgaaggagcagttacctgttgtatcacacctttgggtgttcttccagcctgaagctctgtggtttattcgtaaacagttctacggggtaggaacagtcggataagcgtaaaaacacgggtgaagacataggctttgtctatgtctgtaacaaggacgaggaggaacatactctttacacgtaggaggttataaaaaacataatgcgt

SEQ ID NO: 286 - DNA, 1266 bp, Human gut metagenome
atgttgcaaaaacaagaatatgcgttagtattggatagtgatgggaataaacttgctccaactaaagtacagaaggcttggttcttaataagaaagaaacgagcaaaactaattcaaaggtatcctatggttattcaattaaccaaaaaagtgaatatgataaaagatggcacaactctagaatgtggaattgatgatggttctaaatatgttggcattgcattagtgcaaaagtgtaaaactaaaaacaaagttttcttcaaagggactattgaattaagacaagatgttaaaaagaaaatggatatccgtagagaatatcgtagatatagaaggagtcataaacattatagaccagcaagatttaataatcgtgtttctatgataaagaaaggactgcccccaccaagtattaaacaaaagaaagactcaataattagagttgtaaatagtttaaacaaatttgtcaatattgataatatccatttagaagatgtaaaaattaatattagagaaatggttgaaggcaagaaactttatggtgatgaatataatattccaaataaagaaaatgccaatctaagaatagcgactttgattagagataattatacttgtcaagagtgtagcaaaaaaacaaatttggaagttcaccatataattcctagaagtaaaaatggttctaatagtatttataatacaataacattatgtgcggattgtcatcaaaagacagaaggtaaagaatttttattcgctggtaaatatttaaggcaaataggaagtgattttcttaaaggtcttaattatgcacaacacgtaatgcaaggcaagaagtatttaagggctagattgagagaaattgtaaacttggacacaaccgatggtttaacaacttcagaaagaagggaaatgtggggtatagacaaatctcatagtaatgatgcagtttgcatcacaggattaaaacctaatgacatagaaattactgaatatactataattccacaaagaagaaagagtaaagctaaaagtaaagggttaaatgggtttaaacatcgtgatatagttacatatcatcacacaaataacatagattatattggtaacatcaccgcaatttatactgatggaacaaatacattgaatgtaaaaaccaaagaaaaacattttaaaagagtttcttacaaaagatgtaaattattttataggtttgataaaatttggtggttacaagataaatttatacaattttatataatttag

SEQ ID NO: 287 - DNA, 298 bp, Human gut metagenome
tagaaaaatatatgataaagtagatgcttggcctttattacatagattttctaacaggtttcaagccttagtgattgtcaatattgaaaaatatttggctgatatgaactgcattgagagaaaaagttaaagacatacctttagatgttatctccagtctgaagctctatgaactccaaccaagaaacatatctaacatcttgatatgataacagggaaaagtaagaactcctcttgatttgggcaaggagaaaatactccgtaaaaggaaggtgacagagatgttgcaaaaacaaga

SEQ ID NO: 288 - DNA, 921 bp, Human gut metagenome
atgtccgttgctgtgattagcaaaactggcatagtactcatgccaacaagtgaataccgggcacgtaagctgctggactccgggaaagcaatcatttatggataccgtccattcacgatccagctaacagaaagggaaaccggtgatgttcaaccggttgaactctgtgtggatacaggatatatccatattggagtatctgtaaagtcagaaaagcacgaatatctgggattacaggtcgatacattaactgacgagaaggcaaaacacgatgaccgccggatgtaccgcaggcaaagacgaaaccggaagcgataccggaagtcgcggtttgataaccggaaacggaaatctggctggcttgccccgtcactggaacataagaaagagatcaatctgcagatcataactgctatctgtggagtatatccaattgcagacatcacgctggagatgggaaactttgatacgcaggttctgaaagcaaaggaagaaggtaagcagataccgcaaggaactgattaccaacatggagaacggtatggaattgcaacgctccgggaagccgtctttacaagggatgggtataaatgccagtgctgtgatcgaggcatcaaagatggcgcaatcttgcacgctcatcatatccagtatcggagtcagggtggaaccaaccggatgtccaatctgatcacggtatgtgaaaagtgccatacaccagccaatcataaaccgggtggaaaactgtatggttggaagccgaaaattgcttcgttcaaggacgcaacttacatgacagcagtccggtggcaactgtatcgtaaagtgaaagagatgttcccggggatccatgtcaaaattacctatggagcagaaaccaaggaacgccgtagaatcctggatatcaaaaatcccatgtga

SEQ ID NO: 289 - DNA, 418 bp, Human gut metagenome
gtcaacaaccccgtctgaaataaatttcaggcggggcttataaaagatctgattttttattggatcttagtcccgtcttaggtttattgatggcgacgaccgcaaggccgtaaatgattagcctcagtgcaacgaaaccggtcagaccagacacggtgaatcattagcactacgttaccggtaaaattaggcactccgggatgcacctctagtcccagaccctgcggtatcttattaaacatctctgagggtaagagaagtgtgagatacgcgaaactaccggataacattggcgaagaggaccaccgattctgagtaggtgcttgtaccgaaaggatagagaacctgtatgggatacctaggatatctgatacagaaggcgtaagccaaatttcaggaaggaggacagcttatgtcc

SEQ ID NO: 290 - DNA, 1278 bp, Unknown
  Ga0074469_10883752 JGI
atggtttatgtactatcgcaaacaggcaaaccgttaatgtcgactgagcgacacggaaaagtcaggcgcttgcttaagtcgggcagagcaaaggttgtcagtcggacgccgttcactatccagttgctttacgagactacccaacatactcaacctgttactctgggcattgatcccggatataagaatgtgggtttatccgcagtgacagacaagagcgaggtcttcagtgcagagactaaagttaggacggatattccgaaattgatggaggttaggaaacagtatcgcagagctaggcgcaataggaagaccaggtatcgcaagcccagattcaacaacagggtacgtactaagcataaggggtggctagctccatcagtagaaaacaagatggatgcacatatcaagctgttaaaattggtgtgttctatactgcccataagcagtattgtgattgaagccgcccaattcgatatgcagaaactaaagaaccccgaaaccaaatggactgactaccagcagggagagcaagctggcttctggaatgtgagagagtatgtattatggcgtgatgcaaatacatgccagcattgtgaaggcaagtcgaaagacgttatcttggaagtccatcaccttgagagtagacggacaggcggggatcgacctgcaaacctgttaacactgtgcaaaacctgccataataggtatcataaggacggttttgaacttccaaagcccgggtgtggattcaaagcagcggcgcacgcaaacataatgcgctggaagttatacgaacgcgcaaaggcgttaggcttccctgtaaagataacgtatggctatcaaaccaagtgcagtcgcatatcacaaaagctggagaaaagtcatatcaacgatgcgtttgtcattgcaggcggcagtggtcagctacggaagcaaggaggattccagtttcggcaggtacggaagcagaatagaaagctatacaggggtatcagaagtcacgttaggagcaaattggctagagttctattcggattccgtcaatgggacaaggtgagatacaagggtcaagagtattttattaagggacgcagatcatctggctatttcagcttatcggatattcatggccaaagtgtttcactggacggcaagaaactagatggtgttaagtattcagaactctgtttagtagaaagagcatcgactttattatcaaggaggagcgacttcctctccccgatgaatcggggagtatccgtcgctgatattcta

SEQ ID NO: 291 - DNA, 250 bp, Unknown
  Ga0074469_10883752 JGI
gtcaactacccccgcataaatgcgggagcttgtagaaagcttctggttgactagcttaagtgcttcgagcactacgttggttgggtcaggataccctggaatactcctctagttccaggcactatcgttaggcattaaaagctctgagggagtcggagcagtgtgtttagcgtgtaagccctaccaacattggcgaagaggacacaacagatacctcggtatctgatttatccgaaaggattctcctatg

SEQ ID NO: 292 - DNA, 819 bp, Unknown
  Ga0209253_10060444 JGI
atggcagtctttgttttggaccgcagcggcaagccgctgatgccgtgttcagaaaagcgggcgcggctgctgctggaacgcggccgggcgcgggtgcatcggcgcgtgccgttcgccatccgcctgaccgaccggcgtgtggccgactgcgagaggcagccgctggcggtgaagctggacccgggcgcgaagacgacgggcatagccgttgtgtgcacgacgggcaaagcggtggccgtgcttggtctattcgaattgcagcatcgcggcgacgcgatccgggacgcgctcacgtcacgcagccagaaacgccgccgtcgccggggtgcaaacctgcgctaccgcgcaccgcgtttcgacaatcgccgtcgtcccgacgactggctcgcaccgtcgctgcagcaccgcgtcgataccgtgctgacgtgggtgcgcaggttccaacgatgggcgccgatcgacagtcttgccgtcgagcgcgtgaagttcgacatgcagttgatgcagcacccggacatcgccggcattgagtatcagcagggcacactctccgggtattcggtgcgcgagtacctgctggagaagttcggccgccagtgcgtctactgcgatgcacagagtgtgccgctggaaatcgagcacgttgtgccgcgggcagccggcggatcgaaccggccgagcaatctgacgctggcctgccggccgtgcaacgcgaacaaaggatcgcgtccggtcgagcagttcctgaacgggcagcctgaccgtctggcgcggctcaaacgccagttgaacgcgccgctcgcggctgccgccgcggtg

SEQ ID NO: 293 - DNA, 293 bp, Unknown
  Ga0209253_10060444 JGI
gtcaatcactccggcctgaagtgaaggccggagcttgtggggggtcactccacggctcgggattgaccagagaaagcggtaaccaacccgctacgttatgtagaggttcaagacccaccggcgaatgcttcctcagttcgccgctctggaacctgcgaccgcagacacgcttcgggtaagcacgaaacgggtcgcaaggatgtgccgctacacaacattctcgaggggagacagccgaaaggctgcgtaacaaggcccgtaagggcagcaacacaggagagattgccatggca

SEQ ID NO: 294 - DNA, 1266 bp, Unknown
  Ga0172378_10009394 JGI
atggtttatgtaattaacaaagacgggagtccgttaatgccttgcaaacctgtaatcgcaagattacttttaaagcagggtaaggcaaaatgtatcaagagaacgccttttacaatcaagttattgtatcaggcaacatcgtacactcaacatttgacattgggaattgatactggtagcggtacaatcggaactgcggtggttgataacgataaccaagtggtttacgtgtcgcaagttgaagtcagaaatgatattaacgacaaaatgacacagagggcgaagtacagggtgaacagacgaagcagaaaaaccagataccgaaaagcacgttggttaaacagggcaaacagtatcagaaaagaccgtttttcgcctacaatgacaagcaagattaattcacacttgaaggaagtcaagtttgtaaattcgatattaccgattagcaaaataattgttgaaacggcaacatttgatcctcatgccttaaaaaatcccgccgtcctacaaaacaagtggttgtatcaaaaaggcgtgaattacggttttgcaaacactaaggcgtatgtattggacagagataggcacaagtgtcaatattgcaaaggcaaaacaaaggattcaaggttgcatgttcatcatattacattcagacgaaacaaaggttccgataaacctgaaaaccttgtaactttatgcaagacttgtcatgacaagttgcacgccggggaaattatattaaagacatacggcaaaactaagaataatttaaaacatgctacgcagatgaatagtatacggattcaattattaaagtgcttgccggatgcgcaggaaacattcggatacataactaaggaacatcggcaattgatggacttgccgaaagaacattgttttgatgccgtggctatcgcttgtttgaacaatatctccaatgacgggttgttgagtgtagattttaaaagcgacaaaataattttaaagaagtgcataccagatggagattatcagcagacaaagggcgtgagaagcgaacaaaggattccgacgggtaaaatacaaggatttaggaagtttgacaaggttatgtatttaggaaaagagtatttcattaaaggtaggatgtcaacagggtatgcaatattgatggatattaacggtaataaggttgattcgaaacctattcctaagtttgacaagatgaaacgaataagatcgagaaaatcatggatggtgagcgacgcattcatccctcacttatag

SEQ ID NO: 295 - DNA, 302 bp, Unknown
  Ga0172378_10009394 JGI
gtgaactaccaccacttaacctgaaggtttgaagtggtggcttctacggaagcctaagttcaccggactaagttggtagaaatatcagctacgttgaaacggttatgacacctacggttgacgcaccagaccgttgctctgtcgcatatgtttaagtagagccgaggtaaggttcggtgatatatgcatgtaagccgtttcaacattgtcgaagtgaagtcggattccttgcatggttacagtgcaaggatacgcacgacttaccgaaaggcaaagtattttctgaaaggattcacaacatg

SEQ ID NO: 296 - DNA, 447 bp, Unknown
  Ga0137388_10019024 JGI
ttgagcaaagttttcgtcgtcgacacgaataagcagccacttgatccagtccatccaggacgagctcgtattttgcttaacactggaaaagcagcgatctacaagaagtttccattcacaattattctacaagaagaaatacatgatccagaggtaaaagagctgaggatcaagattgatctaggaagccgggtcacgggaattgcaattatcaatgatcagtcaggtgaagtgatttttgcagccgagctttcccatcgcggacaagcgattaagaacaagaacacgggcctgcatatcggacgagtattaacacgtgcaactggatcatttgatatgacaacgcgggctggacgtgtcggtaacgtcaattcccaatattgccgacctatccatcaaagggacggctatagttatcagaaaggtggcgggctctccgttcgctag

SEQ ID NO: 297 - DNA, 296 bp, Unknown
  Ga0137388_10019024 JGI
atcatgaaccacccactgaaaagcgggagcttgtagtgacccgaaaggggaactacaaacccaacatgaccagactcagtgctagggcttgtctccagcactccgttaggagcgaaactaggtacgttgggatgcgcggccagtcccaacctctacggtagcaggttaaacatctctacagtggttaaggaagtgcttgctacgctaaaccgctccataacgttgtcgaggccaacatcacctgggaaaccagaggctcaatgaggagcaaatacaggagtatacacttgagcaaa

SEQ ID NO: 298 - DNA, 1146 bp, Unknown
  Ga0126377_10033159 JGI
atgagaatagccgttttagacacagccaaaaaaactctggcgccgacgacgccgcgccgcgcccgattgctgttgaaatcgggcaaggccgcggtgttcaagcgctatccgttcacgatcattctcaagcgagagatcgaaaaccccaccctgcccgacctgaagttaaagattgatcccggctcgaaaacgaccggcgtcgcgatcgtcaaccaagaaagcggcgaggttgtcttcgcggccgagatcgagcatcgcgggcaagcgatcaaatccagactcgatgcgcggcgctcgcttcgccacggacgccgcgccagaaagacccgctatcggaaggctcgcttcgacaatcgaaggcggccggaaggctggcttccgccttcgctcgaaagccgcgtcgagaatgtccatacctggacgcgcaggctcattcgcgtgtatccgatcagtggcatcgcgatggaactcgtcaaattcgacacccagttgatacagaaccccgagatcgaaggaattgaatatcaacaaggcgagctccagggctttgagctgcgcgaatacgtgttgatcaaattcaatcacaaatgcgtctacgccggcgacgacagtccctgcgatcacgccctgaacgttgatcacatcatccccaggtcgcgcggcggctcgaaccgcgtcagtaatctcgtttgcgcctgccgcaagcacaatgaagagaaaaacaatctatcgctcgaagaatacgggcgcatgcgaggcaaagactttgcccatgtgaaggcgctggcaagagcgccgttgaaggatgccgcggccgtcaacgcgacgcgatgggcgctcttcaaccggctcaaatgcagggagttgccgatcggaacaggttcgggcggactcacgaagttcaatcggaggctgagaggattaccgaaggcgcattggatcgacgcggcttgtgtcggcaaggagacgcctgaaaagctcgacatatcaaacgttcacccgctccggatcaaggcgatggggcatggggcgcgtcagatgtgccgaaccgataagtacggcttcccgaaagcgcaccggacacacaagacgatgtttatgggatttcaaaccggcgacgtcgtgaaggctgacattccaggtgga

SEQ ID NO: 299 - DNA, 297 bp, Unknown
  Ga0126377_10033159 JGI
atctgctacgccgcgagcatgagaatgcttacggcgggactcaacccgactaagcgtctctcgcaagagagcgtcgtgagcgtcacacacgtcgagctacgatctttgcgaataaatagtcactctgggatgcgacgccagtcccagactctgaggcttgcgattaaacaggcgacaaacgcgaagcccgtgtcgcaggcgaacaaaccgcaaaagatcattgtccaggcgaacatcacgtgacagcgatgtcacgccgaaatcgaaagatttccttttgaatatgagaatagccgt

SEQ ID NO: 300 - DNA, 1407 bp, Unknown
  GENOME_ACESSION: mgm4581772.3 MG-RAST
atggccgtactagtgttggacaagcgcaagtgtccgctgatgccttgcaccgagaagcgtgcccggttgctactggatcgaggtcgggcggtggtagtgcgaattcacccgttcacgatccggttgaaggatcggatcggtggggccacccagccggtgcgactcaagatcgaccccgggtcgcagacaaccggcatggcgctggttcgagtggatagcgatggcaccaagcatgttctcttgctcgcagaactccgccaccgcagctatctcatcagcaagcaactgacccagcgccggtaccgtcgaaagcgtcgcagaagcaagctacggcatcggccagccagattcaaaaaccggtcccgcccacagggatggttgtccccaagccaacaacaccctgtcgacaacgtcatgacttgggtcgagcgattccgacgctgggcgccgatcaccgacatcattcgagaagtggcacggttcgacaggcactgccgggagaccctgggcatcgatgacatccggcagcaaaacgccccccagctcagaaccaccagtgtgcgagagcgcctactgcatctgcacgatggcacctgtgcctactgtgaagggctgtcaggtgaaactcgcctggaagtagagcatgtgcaaccacgaagccgaggtggcagtcagcgcctagcaaacctggtgatcagttgccggagatgcaacgaagacaagggtggccggaatgcggccgaatgggccgaggcattggccaggtctcgaagcaggctgggccagacgcgccatcgcaatgccatgctggtcaatgccggccagcgacctagcggtcgagaccctgcggcagtccatcgcaccagctcggcactatccggctacctgaaagcaacgggcctgcccttgtcttctggacgcggctggctaactcaggagaatcgtcgacgccttgggataccgaagacccatgcattggatgcagcctgcgtcggtctagtcgacagcctggtgggctggaggcggccgacccttggtatcacggccgcgggccgagggagctatcggcggacaaacgtggaccgtcacgggttcccgaggagctaccggccccggcgaaagatgtcacatgggtaccaaaccggtgaccacgtacgagccaccgtgccgaccggaaagaaggcgggcactcatgtcgggcgggtagcgatacgtgccggcaggcaggtggacatagtgacagccaccggacgtgtacagagcatcagttatcgccactgccgcctgatccagcgggccgacggttatgggtacgccactcttccctcaccacggatggaggaagccgggctagcgaagtgcaacgaacccgccctcctcaccaccctattcgttcgaccgaagtaa

SEQ ID NO: 301 - DNA, 291 bp, Unknown
  GENOME_ACESSION: mgm4581772.3 MG-RAST
gcctactgccccgccgtgatcggcggagcctgtgaacaggctgggtgggccagggagagcggtacccaacccgctacgtcggcaacaggtcgttgcgatccactccggggtgcttcctcagccccggaccctggaaggtgaggtcatgctggtgaaaggcaaagcaccgaaggctgacaccgctgccgcaaggcaggagccagttgtcgacattcccgaggggagacggagcacttatgctccgcgtcacaagcgtccgtaagggcggagatcaggaggtatggcatggcc

SEQ ID NO: 302 - DNA, 1647 bp, Streptomyces sp. SAT1
atgactacgtttcatacaggtgagcagacccaccctgccgtacttcctcagcggcaggctctggaacccacggctgcagacaaccccgggagctgggacgaaacgggccgtgagcgcatcacccgccagggtgatgcagccggtatggaacatgggcgaggggagaccgtacgcacgtcacctcccggcgtacggcgacaccccgacgctgccgcgtccgcggtagtgaagggaggagaggctgttcgtgagagcagcattccgcaggcaggagcgagtcaaccgagggcaggggcacaaatggtcgccgtcctcgacaggaacgggtgtccgctgatgccctgccatcccgctcgagcccgcagactcatggccggtggccgggcggtcgtagtgaaaaccgcaccgttcgtcatccgtctgaaagaccgcgttgcggagagctccgaggtatccggcgttgcggtacgcatcgaccccggttcgaagggtacgggcatcgccgtcaccgccgatgtcgagtgctccgaccggggcagcggtgaggtcacgacaagtcgccgggggctgcacgcaacggaactccagcaccgtggcgcacagatccacaagagcatgcgacagcgggcggatcaccgccgcaggcgacgcggcgcgaatctacgctaccgggcgccccgatttctcaaccggtcacgtcccaagggatggcttgccccgtccctgcagcaccgggtggacacgaccctgagtaccgtcgctcggctcacaagatggttcccggtcactgaactccatgtcgagcgtgctgctttcgacaccgcggcgtttggccttgatcgtggcggcccgaacagtgtggagtaccagcagggcgctctcgcgggatacgaggttcgccagtacctactggagaagtgggatcgctcctgcgcctactgcggagcgaagaacgtcccgctccagatcgaccacatccaccctcgcgctaccgggggctccgaccgcatcagtaacctgaccctcgcctgtgcttcctgcaatcaggacaaagccgcgcgtccggtggaggagttcctggccggcaggcccgtgcagttggcgcggctcctcgccggagcacagacgccactgcgggacgcggcagccatgaacgccacccgctggaagctttggcaggccctcgagagcctggggctgcctctgtccgcgtggtccggcggacggaccaagtacaaccggtcgatgcagggcctcgcgaagtcgcacacactcgatgccctcgcggtcggcgaggccggccccagcacccgggttgtccgataccccggcacagtactggtcacctcagcgtgtgggcgcggctcctacgcacgcacgcgctcggacaagcacggcttccccaggctctacctgccacgtcagaagcagcaccacggttttgcgactggcgatctcgtccgggcccacattccacgcggcaagtaccgaggtacacacaccggtcgcgttgctgtgcgtgcttccggcacccaccgcatctccatccctggcgggtacgccgacaccagccacagcaacctgcgccttcttcaacgaggcgacggatacgcctacaccatgaggaaggaggacgcgcggccttag

SEQ ID NO: 303 - DNA, 291 bp, Streptomyces sp. SAT1
gtcagccgctccccggccgaagaggccggggcccgcccgcccctagtgggcgagtccctggttgaccagcccgagtcatcggtgaacggaggtgttcgatgactacgtttcatacaggtgagcagacccaccctgccgtacttcctcagcggcaggctctggaacccacggctgcagacaaccccgggagctgggacgaaacgggccgtgagcgcatcacccgccagggtgatgcagccggtatggaacatgggcgaggggagaccgtacgcacgtcacctcccggcgtac

SEQ ID NO: 304 - DNA, 1440 bp, Unknown
  GENOME_ACESSION: GCA_009843725.1_ASM984372v1_genomic
atgccgggtcaggctcgaaacggggcgaaccgcagcgcgggcggtcaggttgtgcgaggggagtccggcgcaagccgcgtcttcgtcctcgaccggtggggcgacccgctgatgccgtgccatccggcgcggacgaggacgcttctgaggaaggggcgcgccgtcgtggtgcgtctccatcccttcaccatgcgcctcagggacaggaccggagggaagacccaggaggtcggcctcgggatcgacccagggtcgaagaggacgggcattgcgcttgtccgtagcgacggcgaggtcctgtcccttgccgagatcgagcacaggggaaatagggtccggaaactgatgcttcggcgcgcggcatgtcgaaggcggcggcgatcagccagcctgagataccggaagaagcggttcctgaaccggcgctcggggagacggctcccgccctctcttcagtcgcgggcggacaacgtgctgtcctggtcggcacggttcagcaggcttgcgccagtgaccgggatccggtgcgagacggtgcgcttcgacatgcaggccatggacagccccggcatcgagggcgtggagtgccggcaggggacgctcgccggatacgacgccaaggagtgccttctggagaggtgggggcgcaaatgcgcctgctgcgacgcgtcaggcaaaccgctccagatcaaccacgcctggccgaaagccctgggcgggtcccgccgggtttcgaacctgacgctcgcctgtgcgtcctgcaacccggccaggggatcgcggtccgtggagaccttgctggccggccggcccgatcggttgcggaggatcctggctgaggccagggcgccgcttcatgacgccgccgcggtcaatgcagcccgtcgcgtccagttcgaggctctggagcgaacggggcctcctgtcatcggcttctcagggggacgaacgaaggtcaaccgggcgcggctggggatccccaagccgcatgcgctggacgcggcctgtgttggcgagacgtcttcgctttcgggctgggaccagcccgtgttcggaatcagggccatgggccgggggacccatgcacggacccgcgtcatgcgcttcggctttcccgtcggctgcctggcggcgcgaaagtccgagatgggcttccggacgggggacgtcgtgcgcgcggccgcgcccgcgggcacgcggcaaggccttcatgccgggcgcgtcgcggtgcgcgcctcgggctccttcaacgtccagacggtcagcggcaccgtccaggggatctcccgccggcaccgccgcatcgccgagcgcgatgacggttacggataccacatcgacgcgtcacggaagaaggggactgcgacgatgcacggaacacggaatcccgcattcctccccgcccggaggtgcagagtttcctgcgggtcggaccgatga

SEQ ID NO: 305 - DNA, 247 bp, Unknown
  GENOME_ACESSION: GCA_009843725.1_ASM984372v1_genomic
gtcagcgacccctccctgaagggaggggcttgaggggcggaagccccgagagcccatgctgaccagcgcgagaaaggagaccatcatccaatctaccctgaaccatacgttgaagaccgaccctgggatgctgcctcagtcccaggctctcgaaggttcgcctgcagacatgccgggtcaggctcgaaacggggcgaaccgcagcgcgggcggtcaggttgtgcgaggggagtccggcgcaagccgc

SEQ ID NO: 306 - DNA, 540 bp, Unknown
  Ga0376441_00010 JGI
atgcaaaaagtgtttgttttaaattcagagaaagaccccctgatgccctgccatccagcaagggccaggcaattgcttaggactaaacgagcaaaggtgtttcgcaggtatccttttgtcattattttaatcgcaaaaacaaccaatgcaattcaaccgattgagattaagttcgatcccgggagtagaacaacgggagtatgtgttggggaaacaggtgagaacgttttaatccagaaaaccacgttgccgatcttaatcaaggccatgggaagaggatccaggcaaatgtgtcgggttgatcaatttggatttccccggacaggcgcaaagtctgcaaaaaccgtcaaaggattccaaactggggaccttgtaaaggcaattgttaccaagggaaagaaaattggcatatatactggtcgagtagctgtacggacatctggtagtttcaacatcaagactggatcagaaacggtgcaagggattagttggaaatactgtaatctaattcaaaaaacggatggttatacttatgggtaa

SEQ ID NO: 307 - DNA, 278 bp, Unknown
  Ga0376441_00010 JGI
gtcaactaccccgccctgaaggacggagcttgtagaaagctctcatgttgaccagcctacgaagtcttgaaacaaaggctacgttactgaagaatatataggtactttggaatgctcttccagttccaaacactacggataagtgttaaacaggtttaaggggttaagccggtgctcttatcaaacaaaccttcggataacattggcgaggaagtatttaccggcttaaacgccgagcgacaggtaactgtcaatttaaaggatgtttgatgcaaaaa

SEQ ID NO: 308 - DNA, 1290 bp, Human metagenome
atgttagtgtatgtattaaaacaaaacggacaaccttttatgccaacagaacgctttggcaaggttcgtagattattgaaagaaggaaaagcgaaggttgtccgtagagagccattcaccatcaagttgctttatgaatctgaaacagatgtggttcaggaatgttactgtggtgtagatacaggctcaaaatatgttggtgtagcggttgttggaaatgacaaggtgttgtaccaatctcaaacagaattaagaagcgacatcaaaaagaagatgggccgtagacgtggttttagaaaagtaagacgctcaagaaaaacacattacagaaaacccaggtttttaaatagaagaaattctatcaaaaaagatagacttccaccttcagtaaaacataaagttcaggctcacatagatgagatagagttctgtaaaaagattttacctgtttcagacttaattttagaggttagtcagttcgatatagctttgatgaaaaatcctagtttaatcaatgagagagtaaaacactggagctatcaacaaggtttcaactatggctattcgtctagaagaagtgcgattcttcatagagatggttatacttgtcagtgctgtggaaagaagaactgtagattagaggttcaccacattaaatttagaagtgatggtggtacagatgatgaagaaaatttgattactctgtgtgaagattgtcataaaggtattcatgcaggtactatagtcttgaacaagaaacctaagaagaataagaatttgaaatacgctactcacatgagcataattaggagttggttgttgaagaaatatccggacgctattgaaacctttggttttattacagcagaaaataggaatcacttaaaattagaaaaagaccattatatagacgcttgtgtaatcgcaagtggcggattagagttcaaaatgttagatgtgatttatagaaaaagacgtgttccggttcaagataggattttgacaaaaggtgttcgagatgaaagaaaaataccaactagcaaaattcatggatttaagagatacgacaaagttaaatatcttggagaaattcatttcattaaaggtagaaaaagtattggagcgtttgttttgatggatattgacaacaactctattgattttagagatagaggaggaaaacagaatccaccatataggtttatcaagagattaaacacgagaagaagtgttttatgtattaaagaaaaaatagaaagagaggtaaggcttattcctgtattaagctaa

SEQ ID NO: 309 - DNA, 332 bp, Human metagenome
gtaaatatgcactaggttaaaaacctagtaccattaaggtacgattgtttacaagactaaggttagagaaatttaacctacgatagttagatgaaacacatacacaccctcggttgaatgctcaagactgaggctctgtgattactgattaagttgagttgagagtgctaaaagaactctgtgtcagtaatttcaaaactctaattatctttgtcgatgagaagaccgacaccaactttggtaacagaagttggttaggcgctacagttcgataagtactgtcttaaagagttaaacttgtcatcaacgaaaggaattgaagtgtgatgtta

SEQ ID NO: 310 - DNA, 1593 bp, Unknown
  Ga0307374_10008841 JGI
gtggctacgttgcaagcaggcgagaagacccaccaagggatgcttcctcagtcccttgctctggaatccgcgccagcagacactcccaggggtgggcacgaaacggggcgcggaggcaggccgagacggcctgcaaccggcttgcaacttcgtcaagaggagactgccttgggccacaccgcccaagacggcgtcaccccccaacaggagaccgctcctggcaagggcgctggacggagcaatccgtcaaaccatgtgttcgtgctcgataagcatgggcatccacttatgccctgcaacgcggccagggccaggcaactgctcggcgcaggccgggcaagggtccaccggatcgccccgttcgtcatccggctcgtggaccgcgaacagggggcggcgacaactcagccgatccgccttgggatcgacccgggctccaagggcaccggattggccctctacaggatcgagagccccagccagtgtgaggtgcgccatgtgctcttcgggctggagctccagcaccgctcagggatcatccggaagcggataggccagcgggccgcgcaccgccgccggcgccgctcgtccaacctccgttatcggtcgccgcggttcgacaaccgcaccaccaagcagggctggctggcgcccagcctctactctcgcgtgcagcacatcgacagctggactgcgcggcttttgcggtgggccccaatcaccgggacggatctggaacttgtgcgcttcgacatgcagcagatgcagaacccggagatcagcggcgtggagtaccagcagggcaccctcgccggctacgaggcccgggagtacctgctggagaagtggggccggaagtgcgcctactgcgacgccgagaacgtccccctcaacctcgaccacgtggcgcccaagtctcgagacggctccgaccgggtctcgaacctgactcttgcctgcatcccctgcaaccaggcaaaggacaaccggccagtcgaggagttcctggcacatgacgccaagcggctgggtcgggtgaaggcccaactcaggtcgccgctccgcgacgccgcggctgtcaatgccacccgctgggccgtcaaggcgcgacttgaggcccttggcacgcctgtggcctgctggtctggagggcgaaccaagtggaatcgccaccggcttctcgtcgcgaagtctcacgtcgccgacgccgccgtctgtggggacgttcagggtgtgcgccatgctggagtcgtttatctggtggcagcggccactggccggggaagtcaccagcggacacgcaccgacgccttcggcttcgcgcgcctctacttgcctaaggtcaagcggttccacggcttcgccaccggcgacctcgtggtcgccgacgttccactcgggcgcaaggcctcaggacatcacaccggtcgggtcgcagtgcgtgcctctggctcgtttcgcgtcggaaccctggacgggatcaattggcaacactgtcgcttgctccagcgagccgacggctaccgctacacacaaggagccgctcctcctcccggccctgaacgaccgggtctccggaccggcgggatttga

SEQ ID NO: 311 - DNA, 314 bp, Unknown
  Ga0307374_10008841 JGI
gtcaaccaccccgccctgaaggacgggcttgtgaggcggccgagccgccttccgggctctgctcgaagggaaacggttgaccagaccaagccgctgacaggaggtgtgacacaggtggctacgttgcaagcaggcgagaagacccaccaagggatgcttcctcagtcccttgctctggaatccgcgccagcagacactcccaggggtgggcacgaaacggggcgcggaggcaggccgagacggcctgcaaccggcttgcaacttcgtcaagaggagactgccttgggccacaccgcccaagacggcgtcacccc

SEQ ID NO: 312 - DNA, 1365 bp, Unknown
  Ga0111052_100017 JGI
ttggatactgtagctgtaataagtgcatcaggcaaaaagctgatgccgaccaattcttacagagccagagggctcttaaaatcaaagagagctgtcatacacaaatacagacctgtatttaccattaaactggtagataggactaacgggtatacacagccgatagaatacaaatgtgatactggatatcaaaatatcggtatttccatttgttcagatacaaaagagttcgtcaacgagcaaagagatctgcttaaagacgaagtaaaaaagcatagcgacagccgtaaataccgcagaaccagacaaaatcgcttgcgttacagaaagaaacgattcaataaccgcaggggtatgattagcagagatgggtttgccccatctatccgcaacaaaagagacgtacatattcgtctgtatgaggagtattgcaaaatattcccaatcgcaaaagctatctttaaaatggggcagtttgatacgcaggtcttaaaagccatagaagctggacttccagtccctaaaggagcagattatcagaggggtgaacagtatggttatgccacgcttagagaagctgtatttgcaagagataactataaatgtatctgctgcgggaagtcagcaatcaaagatggggtaaaactaagaatccatcatatcggatatctcagtggggacagaagcaacagaatggcaaaccttggttctgtatgtgaaaactgtcatacgccaaagaaccataaacagggtggaaagttgtataacctaaaaccaaagctaaaagaactcaagggagcgacttttatgacgacggtccgctacagcatggtaaaaaatcttaaagctgcaacaccaaacgtagatatcaaagttacctatggagcagcaaccaagctcgccagaaaagatctcaatgttaggaaaacgcactctaacgatgcatactgtatgggagaatttcatccaaaacatcgaagcgactttaggcattacaagaagtgtcgacgtaataatcgtgtgttaagtaggttttatgatgcaaaatatcgtgatctcagagatggttctactaaaacaggctctcagttatcctgcggacgaacaaaccgaaagatctcaagacatataaagcttgatgaacgtatttatcgagctcacaagatctccaaggggcgtgtttctacaagaagacaacattactcattaagacctggagacaaggttttatacgatggaaaagtatacttcgtaaaaggagtacagagtaatgggaccagcatcaaattagcgaatggaaaagtttgcccattaaagaaagttaacatattgcagcactgcaacgcatgggcttttatttgctaa

SEQ ID NO: 313 - DNA, 310 bp, Unknown
  Ga0111052_100017 JGI
gtcaacaaccaaccacttaggctaaagccttgaagtgggagcttttgtaaaaaagccctgttgattagcctaagcacttcgagtgctacgttaaagcagaatagataggtacgtcagaatgcttcacaagttctgacctctacggatatatattaaacatctctgacgggtaggagaagtgtgtatatcgaaaaacctgttattaacattggcgatgtgaaccactcccgtaagggaagaacccgacatcttcatggtcggaggcgtaagccaaatattttagaagaaggaggtatcagttttggatact

SEQ ID NO: 314 - DNA, 888 bp, Unknown
  Ga0210003_1012872 JGI
atgcagaagttagggaaaaagctaaagaacgtacctatggatacttcacacgtccatagctctataagttcttctttaaacagagttcaaagactcagtgagaagaacatgtgctgttcccataacaatcccgaagtgaatcaacctcaatgtaaagaggggcagaacttgagagtatctaccaaagtttacatattgaatatgctaggtaatcctttaatgccatgtagtccgagaaaagcaaaaaaattattaaaagaagggaaagtagtagttgtcaaaagatttccattcacaatccaattgttaattccaacaggggaaacaaaacaaaaaataacattaggaattgattctgggtatatgaatattgggtttagtgcagtatcagaaaaagaggaattagtatctggtacagttaaattagatgaaagaacatcagaaagattaacagaacgtaggatgtatagaaaaattagaaggagcaaactttggtacaggaaatcaagatttttaaatcgctccaaaccaaaagactggcttcctccatctatacaaagaaaatatgatgcacatttgaatcttattaacagaattaagaagattattcctgtttctgaaacaattattgaagtagcaaatttcgatattcaaaaaattatgaaccctgatatttcaggaacaggttatcaacaaggttctctatatgaatatcagaatatcagaagttatttaatgaccagagaaaaaggaaaatgtcaactttgtggtaaggattttaaaggacagtcaagtcatatacatcactgtaaacaaaggaatgagaatggaagtaatagacctaaaaatcttgctattttacataaggcttgtcataaaaaactgcaa

SEQ ID NO: 315 - DNA, 266 bp, Unknown
  Ga0210003_1012872 JGI
gtcaaataccacgcactaaagtacgtggcttgagtcgtgagactcaacgtaagagttgattagggggcttaaaggaatttatgcagaagttagggaaaaagctaaagaacgtacctatggatacttcacacgtccatagctctataagttcttctttaaacagagttcaaagactcagtgagaagaacatgtgctgttcccataacaatcccgaagtgaatcaacctcaatgtaaagaggggcagaacttgagagtatctaccaaa

SEQ ID NO: 316 - DNA, 720 bp, Unknown
  Ga0310695_10070301 JGI
atggtctatgtactgagcgcatcagggaagcccctgatgcctacaaaacgcttcggacatgtaaggcgcatcctccgcggcggcagggcgaaagtcgtaagacgcacgccctttacgatacagctgacgtatgatggcacggcttacacccagcccatatccttgggagtcgacgccgggtcaaagcacattggtctctcggcgacaacggaaacgtctgtcctctacgaggcagacctggagctgaggaacgacatcacagggctcctctcagcgaggagggagtcgagacgttcaaggcgcagccgcaagacgcggtaccgcaagccgaggttttcacaccgcacaaagtcaaagcataagggatggctggcgccctctgttgagcagaaggtacagtcacacctgacagcggtaaggaaggcctgtaagatgctccctgtttcggagatcacggcagagacggcggcgttcgacacacagcttttaaaggcacaggaaaagggatttccgctcccggaaggagaaggctaccagcagggggaccagctcggctgctggaacgtaagggagtacgtactgttcagggacggtctcacctgccgctgctgcagggggaagtccaaagaccccgtactggaagtacaccatatacagagccgtaagaccggaggcgactcaccggacaacctggtgacgctgtgccgtacctgccataag

SEQ ID NO: 317 - DNA, 306 bp, Unknown
  Ga0310695_10070301 JGI
gtcaactacccaccgcttaggcgctgatgcgccttgaagcgggggcttgaggagaaaggaaaagcgcttgctttatctttctcctgcaggcccggttgaccagcctgagtgcttcgggcactacgttaagagggtcacggtacccgtgggcgtacagcctaacctgcggctatgccgcccgtggttaaacagtcctgagggcaagggacagtgctgcgggcatgacaagcccccttaacattggcgcaggctgcactacagcgaaagctggcttactgactattgtcagttaaaggaggaacgatg

SEQ ID NO: 318 - DNA, 1344 bp, Unknown
  Ga0137371_10000096 JGI
atggttttcgtgcttgatcgtcacaaaaagccgctgatgcccaccacacccaaacgagcgcgcctgctgctggctcgaggtcgggcggtcgtgcatcgcgtcagccctttcgtcattcgattacgcgaccgacgcgtcgaggagagtcggttgcaagaggtcgccctcaaaatcgatcctggcagcaagactaccggcatcgccctggctcgcgtggaagagggagaggttcatcacgcgctctttttggcggaagtggcacatcgagggcaccaggttcatgagaacaaagtcaggcaagctcaagcccgcagacgtcgcaggagtagcaacttgcgctaccgcgcaccccgtttcgaccaccggggtatccccgctggttggctggcaccctgcctgctctccagagttggcaacacgctcgcctggacgcacagactcacgcgctgggcacccctcacacgtcttgagatcgagcaggtgcgcttcgacacgcagttgcttcagaacccggaaatcgcgggcgtgcagtatcaacggggcgaactggcaggttgggaaacccgagcgtacctgctcctcaagtacgcgtatcagtgcgtctattgtggtaagacggattgccccttggagatcgaccatctcctgcctagaagcagagggggctccaaccgcctggcgaatctggtgctctgctgtcacgactgcaaccaggccaagggaaacaagacggccaccgagtttggacaccccgaggtcgaggcacaagccaaacgccccctcagcgatgcagcagccgtcaatgccacgcgcttcaagctggtggaggccttgcgggtctgtggacttcccatcggcacctggacaggtgggcggaccagatggaatcgggcgcgctttggcgtggagaagacgcacgcgttggatgccttgtgtgtgggagaactggcgggggtcagcataggcaggctcaaaacactggctgtcaaggcgaccggcagaggcgagcactgccgaaccaactgggacaggtacggcttcccgcgtggctacaagatgcggcagaaggtggtgcgaggctttcaaacgggggaccgagtgcgagcggtcgtgccagctcccctcaagacggcgggtacgcacattggacgcgtgcaggtgcgcaaaagcggctcgttctctgtgcaaacccgcgacaaggacctcgatgggatcggtgcgcactacatacatctgatccagaaagcagatgggtatgagtatgctctggcggagcaccaaaaccaaccaggaaggccacccctcccctctccaacaaggaacggccattcctccccgtcctga

SEQ ID NO: 319 - DNA, 333 bp, Unknown
  Ga0137371_10000096 JGI
gtcacgaacccccggattcatccgggggcttgcagcgggggcgcgcgtcgtttgcgctgcaagccctatagtgtccagcctcagcgtccaatggcgtaggcagccacgtgcgggcgctccgttcgacaggtcagggtacagccggacgcttcttcaatctggcgcatctaccgtccagggttaaaaggtccgcaggggccagaccggtgccctgggcaagacaagcctgttgaaccttggcgagaagagatgcctgcgcacgccggtgcaggcgcgtcagaccgccccttacggggactcttccttctgggaagaggaaaggatgtccagatg

SEQ ID NO: 320 - DNA, 1227 bp, Human gut metagenome
atggtgtacgtacaagatataaatggtaaacctatgatgcctacaacaaggcatggtaaggttaggagattgcttaaagacaaaaaggcagtcgttgtaaacctatgtcctttcacgattaaattaacctacgaaacaacaaattacaaacaagaaattgtgttaggcgttgatactggcactaagcatgtaggaatttcagcaacaacaaaaagcaaagaactttatagtagtgaagtgatccttagaaatgatatcgttgatcttttggcaacaaggagagagctaagacggacaaggcgatcaagattaagatatagaaaatctcgttttgataatagggtaaaatcaaagcgtgaaggatgggtagcaccttcggtgaagtacaaaatagacgctcatattcgtgttattaataatgtttgctctatactaccaatatctcgtattattatcgaagtagctcaatttgatactcaaaagattaacaatcctgaaatatcaggtaaagaatatcaggagggaaatcaacttggtttttggaacgtaagggagtatgttttggcaagagatgggcataaatgctgtcattgtaaaggaaaatcgaaggataagatccttaatgttcatcatattgaatctcgtaaaataggaggggattctccgtcaaatcttgtaaccttgtgtgaaacctgtcacaaggaatatcacaaaggtaatatagatttaaaaatcaaaagaggtaaatctttacgtgatgcagctataatgggaattatgaaatggagactttatgagactttaaaatcaaaattttctaatatttcaatgacttttggttatattacgaaatacaatcgtattcgtaataacattgaaaaatcccatatctctgatgcctttgttatttcaaataactttaatgcaaaaaggttaggattcttatataagataaaattggttagaagacataatcgtcaaatacataaaatgaaaatccaaaaaggtggagtaaagagacttaatcaatctccttttgaggtttttggattccgtttgtttgatagagtgaaggttgacaataaattctattttatctatggaagacgtaggactggcagatttaacattcgtgatataaatggagaaaattcaaaggatgttacgcataaaaagttaaatttgtcaaggtgtaagcgttttatggtgaaaattgaaatgaaataa

SEQ ID NO: 321 - DNA, 269 bp, Human gut metagenome
attaagttttatactatatcttgtgtgttgaatgaaagttcaattcggttattagcctaagccttgaaacagaggctacgttatttaagaatatatagttacctacggatgtttgcccaagtctgtaactctaaggtaagtgattaaacagtttttgtatttgagaaacagtgttgcttacaaaaacctttaataacattggcgatgggtactaacaggattttatcctgatttatgttgaataaacattaaaaacgtttgtagatatg

SEQ ID NO: 322 - DNA, 753 bp, Unknown
  Ga0129284_10010797 JGI
atggtgtatgtaattaacaagaacggaaatcccttgatgccctgtaaggcagcaaaggccagaaagcttttgcgaagtggtaaagcgaaggttcttctcagaattccctttgtaattgctctgttgtgggattgtgaagaaaaggttcaatccgtgatcggtggaatcgatagtggcagcaaggtaattggttcggcagcagttggaaatggaaaagtgctgtatcaggcagagactattcttcgaggcgaggagatcaggaagaagatggacaagagaagaatgtatcgccgaaacagaagaggaagaaagacccgctaccgagaggctaaatttctcaatcgatccgcttccacaagaaagggcagactggcacccagcgtcaatcataaggtagaagcccatctgagagagaaaggatttatggaaaaaattctcccgatagcaaagtggttggtcgaggtggcccagtttgatattcacaggattaccaatccagaagtaaggggcgctggctatcaggatggcaacaagaagggcttttacaacgccaaggcctatgtgcttcacagggacgattataaatgccagaagtgcagggcaaagaattgcgccctccatgttcatcatataatttttcggagcaggggaggaaccaactctacagagaatctgatcaccctatgcgagagttgccacaaccgtttgcatgagggagaattcgagatcaaagcgaagagatcgaaaaccaga

SEQ ID NO: 323 - DNA, 293 bp, Unknown
  Ga0129284_10010797 JGI
gtcaactaccccggcctgaaggccggagcttgtaaaagctcaagttgaccagagggctaacagaggatcttgttaatgttagcagccgttagaaccgagaaatacatacataccatcggatgccaccccagtccggcgctctatggcctcagattaaacagtcctgtgggtagggacagtgtgtggggcacaaaaaccggttctaactcttcgaggggaagtcggattccagtcgagactcctacccgactggatacgcatcactccaacatacaggaggtcctaaagacatg

SEQ ID NO: 324 - DNA, 1011 bp, Human gut metagenome
ctgactaggcgccggcttgccggagccgaaaggatagagaacctgtatgggctgcttttaaatatcttcggatgtttggaagtagttggtacagaaggcgtaagccatcccggcttgccgggaaaatataaacacaaaggagggcagcttatgtcagttgcagtcattagtaagacagtcgaaagattgatgccaacaagtgaatacagagcacgtaagttgctcaaatcaggcaaagcaataaaacatagttatcatccgtttaccatacagcttactgaaagggaaactggagatatccagctaatagagctttgtatggataccggatatatacatattggaatatctgtgaagtcaaagaagcacgaatatctggcagaacagattgacacgttaacagacgaaagaagcaagcatgatgcatgccgtatgtatcgaagacagagacggaacagaaagagataccgtcagccacgattcaataatagaaagaaagataaaggctggattgccccttctttggaacacaaaaagaaaatacatattcaggcaatttcacgcatcagcagagttatgcctgttactgatatcacaatggaaatgggaaattttgacacacagattctgaaatctaaagaggaagggagaccattaccacatggcgcagattatcagcacggcgaacgttacggcatcgcgacgcttcgcgaagcagttttttctcgtgatagttataaatgccaatgctgcggaagaacaataaaagacggagcaatactccatattcatcatattaaatacaggagccagggtggaaccaacagtatgtcaaatctggctacggtatgtgataaatgtcatacaccgaaaaatcacaagccaggaggaaaactatataattggaaaccaaagctttcatcctttaaaggagcaaccttcatgactgcgatacgatggcagctttacaatgaagttaaagctttattcccagatattgatattcacatt

SEQ ID NO: 325 - DNA, 475 bp, Human gut metagenome
gtcaataacccgcgccagaggtaaacctcggacggggcttgcaaaagaataaattttcttatttccacttttgtttagtcccgttacagtttacggaaagctgttggctgtaaagccttattgattagccttagcagtaacgaaaccggccaagccaggtcaggtaaatctttaactgctacgttaccggtaaaataggcaccgtgggatgctcctcaagtctcacgctctgcggtatgctgttaaacatctcttagggtaggagaagtgcagtatgcgctaaactatcggataacattggcgatgaggacaaccgattctgactaggcgccggcttgccggagccgaaaggatagagaacctgtatgggctgcttttaaatatcttcggatgtttggaagtagttggtacagaaggcgtaagccatcccggcttgccgggaaaatataaacacaaaggagggcagcttatgtca

SEQ ID NO: 326 - DNA, 1020 bp, Unknown
  Ga0315288_10027781 JGI
atgtttagagtgcctgtgataactggtgaccgcaaagcgttgatgcctacgcatcaagcgaatgcgagagtgcttataaagagcgctcgtactacaccgttttttcataaaggtattttttgcattcgtctcaataaatggttaagtgaaaatattcaacctatatcaataggcattgatcctggttccaaaaaggaagcatttactgtgatgtgcgaacatcacactctgctaaatattcaattggatgcggtgactcatgttaaagatgcagtggaagcgaaacgaaatgctcgtagagcaagacgctatcgcaacactccgtgcagaaaaccaagatacaaacaatgcagaagaaaaggatgggttcctccatcaaccaaggcaagatgggataataaaatcaatccaattattgcattgaaaaaagtttatcctatttccgttgtggttgccgaagatgtgtccgcaaggacaatgaagaatggcaaaagatggaacaagtctttcagtcctgtacagtgtggaaagcactatttcgttgaatctattaaatcacttaacttaaatttaactttgaaagaaggttgggaaacggctgctctacgagcaattaattctctacctaaatcaaagaataagatggataatacatgggaagcacattgcgttgactcttgggttctggcaagcgttccgcttgctcaaacaccaatagttaataaagcaatgatagttgcaaagccattgcggtttcaccgcagacaattgcatgtctttcaacccgccaaaggcggtattagaaagtcatatggatcaacacggagttttggacttcgtagaggttctattgttactcatccaaaatttggaaaatgtattgtaggaggttcgtccaaaggacgaatatctttacatagcatttccgacaataaacgattaacacagaattctaaaatagaagatattaaatttttgtgttataacaattggaattttaattttaatcccacccgctaa

SEQ ID NO: 327 - DNA, 297 bp, Unknown
  Ga0315288_10027781 JGI
gtcaactacccactgattaaatattaatgggcttgtagagtgaaacgagttgctacgaggtagcactacgagattcaaagcagttgactagcctatgtcagtttgttcacgagcaatcgtgaatggatatgacgaactgaatcaactgactatagcaggtcgaattcgttccgaatgctcgtctagtttggagtagcgatgttggtcagtggcgaagatgtacacggagcgtaagctccatatacccaccgtaaggtggagattgctcgtaagagctaaaggagatgaatgtttaga

SEQ ID NO: 328 - DNA, 1248 bp, Unknown
  Ga0123349_10013493  JGI
atgtcaaacatatgttatgtcgttgactatagtggtacaccattaagtccaaccaaagaagttaaagcatggtacatgatacgtaaaggtaaagcaatactcgtatctaaatatcctatggttattaaacttcttaaagttatacctaaagaagatatatgtaaagatgaaatacgaatgggtattgatgatgggccattacatacaggtatagcagtagtacaaaaaggtaaaaagtataataaagttctatttaaaggaaccatagaacatcgtaaagatgttaaaaagaaaatggaattaagaaaattttatagaaggaatagacggtctaataaaagacatagagaagaaagatttaataatagaacttctcataaaagatctaatatagctccttctattaaacaaaagaaacaagctaccattagagttattgataatattaataaatttattaatatagattcttattatctagaagatgtcaaaatagatattagatgtctatctgatgactatacaccatataaatgggaataccaaaagtctaataaattagataataacctaagaatagctactttaataagagataattatacatgcaaaatgtgtggtaaaaagaaaggtgtacttgaggtacatcatatattacctaaaagactatctggtacaaataatatagataatcttattacactatgccataaatgtcataagaaagtaacaaataaagaaactaaatatatatcttattttcataagatactaaataatgaagataaagatattaataaaaaacttaaatatgcttctcatgtaatggtagggaagagttatttacagaatagtattaaagatagaggtagtctatttttaactactggaggtgatactgctaataagagaagtgattggaaaatagaaaaaactcactctaatgatgctatatgtataacagatttaaaaccaagaagagacactatagatataaaagattggaatattaagccattaagaaagaagtatgataataaaaagaaaaacgataacttagttatatttcagcatagagattatgtttcatacaaaactaaagataataaattacatgaaggatatataaccgcgttatatccaaataaaaaattacttagttttaaaactaaaaataaaagttataataaaataagtagtaaaaaatgcaaattactttggcattttgataaaataatgtatttataa

SEQ ID NO: 329 - DNA, 347 bp, Unknown
  Ga0123349_10013493 JGI
cctttaaatatattataaagtggacgcttagtctttatattatttattatttgacagctttctagcctaagtgagtgttgctggtgaaaatcacgctgcatgatgaactacgttgaatagtaaggtaaagacacaccctcggatgtaatcttcagtccgttgctctgtgagtgccaaccaagaaacaagtgctaacgtcctgcacggattatcatagctaaatactatgagtaacagggaaacacatgtcctctatttgacattggcaagaagaaaaatactcaatttgattgtaaatataataaattatataaactcttagaaagaaggtgatagaaatgtcaaac

SEQ ID NO: 330 - DNA, 1062 bp, Unknown
  Ga0117908_1041818 JGI
atgcctactaagccagctaaggcaagaaagctggtagagggtggagtggctaagaaatgctggtcaaaggtaggtgtgttctacataacgatgttaatacctgtgggcgaaaaggtacaggatgtggcactggctattgacccaggcagcaaatacgacggctacgccgtatcaggctcaaaagatgcggcactcaaggcaatggcagtgatgcctcaaaaggtacacaagaaggtaacagaacgccggcagttaaggcgcagcagacgctatcggaataaacgacatggcaagtgcaaatttaacaatagaaagcgtaagcagggatggatagcaccaagccaattagctaaggtgcaattccgcatcaagataatacgcgaccttgttaaggtattccctatcaacttcattgcagtagaagatgtgcgatttaaccattacaagaaacggtggggcaagcacttttctactgttgagataggtaagagtatgctatatgacgagttagagaaacatggcaaggtaataaagtatgcaggctggcagacagcagaagcgaggcagtattggggtattaagaagtcaagtgctaaggatgctttgacacctgagtctcatgctaatgatgctcttgcgatgctcaatgaggtattcggggataatgtggataattcatgcatattcatggtatggcgtcgacttgagttttcaagacgctcattgcatcggcaaaattatcagaagggtggtactcgtccccgctttggcggaactaccaacggacattatctccgtaagggagatattgtctatggagagattggagacaggcaattggtgggatgggtatgtggattaccgacagacaggacaaaagccgttgctatagctgatgcttcaggtaaacgtttagcacagtgctctgagcaaaaggtgagactgatacgcagagccactggtatcacatgggaaagtcagtatataaccagggtccctatggcaatcatagtacaaaagccgattcaattagagtatacctctggcaattcctccccttag

SEQ ID NO: 331 - DNA, 292 bp, Unknown
  Ga0117908_1041818 JGI
agtcaataacccctcctgaatcagagattcagaaggggcttgggggacacaggactcccgacgcaagtgttgactagagtgcttaggaactcctgagcagccgcactgcgatggtacatacgttagggtgtttcgctagctcttacctctataaactgtctcttgtgggcagtggggataaagccccgacatacttcgcagtcgcaatctcaaagcgacctttacttagaggaaagggcttgccctttcctccagcctgtatatcaggctccgagaggagacaatcatgaga

SEQ ID NO: 332 - DNA, 999 bp, Unknown
  Ga0395718_000631 JGI
atgataccagtaattgataataaccagaaaccattaatgccttgctcagaaaaaagagcaaggaaaatgattgaatccaagaaagcaacaccattttggaagaaaggagtattttgtattagattgaatcaggaaccctcagcaaggaatcttcaaccaatagttgttgggattgatcctggatctaagaaggaaggatgtacagtaaagagcgaggctcatacattattaaatatcaatgcagatgccgtaacatgggtcaaattctcagttgaaacacgaagaatgataagaaaaaacagaaggcgtagaaaaacaccatgtcgcaaaagaagattaaataataattatcataagcctgggtggctggccccatcgaccagggccagatgggagtggaagattaggatatgtaattggcttgttaaaatgtatcccattactgattttgtaattgaagatattaaggcaaacagcaatgtgcataaagggttttctatacttgaaactagtaaaaagtggttttataaaaatcttacaaaattaggagtggtatatattagacaagggtgggaaactaaagagcttcgtgatagtcttggattatttaaagttaaggaaaaattagccgaagtatttgaagctcattgtgttgatagttgggtacttgccaactgtattgttggtggacattctaaaccagagaatactagattgttatgtataacaccaattagattacacagaagacaacttcattatctacagccagaaagaggtggttttagaaagacgtttggtggcactagtagttgtggtttgaaaagaggatcatattttataaacccaaagtgtggggctttttatcttggtggtgaaatgaatggtaaaataacaatgctttcaattattgatggtaagagaaaatctcaaaaaacaaatccattgaaagtaaaatttaaatcgtataatacatggaaaagacacgtaatagcataa

SEQ ID NO: 333 - DNA, 245 bp, Unknown
  Ga0395718_000631 JGI
gttaattatccagaaatggatttgaaggagtaaaaaagccaactttgaaacaacaaattaaaatagaaactagagtggtcaagattcgcgtaaaccgggtcgtttgaaggcaactgaattaactaaccatggcaggttgaatgatattgaggatgcctccctagtcttcattctctcagttattcagtctcgaagggaagtataatcaaggtgcgtaagcacatttctaggaaataatgatacca

SEQ ID NO: 334 - DNA, 1350 bp, Unknown
  Ga0187860_1009162 JGI
atgcagaagttaagacagagaactaaaaagaacacacctacggatactccacaagtccgtagcaactgtgatcagttattaaacagagaccaaagtctcagtgtaactgatttaaaaacctgttttaacaatcccgaagtggatctacgccaacaacatagtggcgagcttaaagctaaggtctatgtattaaataatgatagtacaccattaatgccgtgtagtccatgtaaagctagaaaattgttaaaaagtaaaaaagctgcagtaattaaattatatcccttcacaatcaaattgacttatgaaagtgaatttcatgttcaagtcattaaattaggcattgatagtggttataaaaacattggtttttctgccattactgaaaatgaagaattattcggaggtgaattaattatagatgataaaactagtgaaagattaagtgacaaaagtatgtatcgtagacttagaaggagaaaactttggtatcgtaagcaaagatttctaaatcgcaaaagaatgtttggatttttaaatcccagtatacaaagacgttataatacacacataaaattaatagataaaattaaaaaacttttaccaatttccgaaataattattgaagtgtctaattttaatattgctaaaatagaaaatcctgatattaagggaattgaatatcaagagggaaatatgtatggttatcaaagcataagaagttatttaatggcaagagaagaaggaaattgtcaattatgtggtaaagacattaaaaataaatcaagccatattcatcatataattcctagaagtaggggtggaacaaatcgtcctaaaaatcttgcaatacttcatgaagattgccatgaaaaattacacaaacaaaatttattttatttattaaaaaaatcaaaacaatataaatcagaaatttttatgtcaattataaataaaagagttcaacaagatattccaaatttaaaaattacttatggttatattacttggattaatagaattaagttaagtttagagaaatctcatcataatgatgcttttataattgcgggaggaggtactaatcaaattagaattaaaccaattattataatacaaaaacatagaaataatagaaaacttcaaacacaaagaaaaggattaaaacgaggtattagaaaagaaaaatataaaattcaaccattagatttattttggattaataataaaaaatttatttctaaaggtatgtgccataatggagaacgagtgatgataaataaaaatgaaagttttttacttaaaaaagttgaaaaaatatttcattttggcacttttgtttttaattaa

SEQ ID NO: 335 - DNA, 260 bp, Unknown
  Ga0187860_1009162  JGI
atcaattgtcaacgaatgttgattcaaatcgtgaggtttgaggtaagtgttgattagggagcttaaaaattaaattttatgcagaagttaagacagagaactaaaaagaacacacctacggatactccacaagtccgtagcaactgtgatcagttattaaacagagaccaaagtctcagtgtaactgatttaaaaacctgttttaacaatcccgaagtggatctacgccaacaacatagtggcgagcttaaagctaaggt

SEQ ID NO: 336 - DNA, 1527 bp, Unknown
  Ga0074046_10018987 JGI
atgcaatctacgttgaaatgcaagtcaaagacccactccggagtgcttcctcagctccggaccctggaagtcttggttgacgttacgggaaaggtaaagcccggcacgatcgagacgggttcgctacgcgcggacgaggctggctttcaacatggtcgaggggagagtccgcaaggaccgtcaccttctccgcaaagagaagagaagagcggggtaacccgcgtttttgtgttgtcgaaggacggcaggccgctaatgccatgccacgcggccagagcccgagaactgctaaggaaggggagggcggtcattgtgcgccgctacccgtttgttattcgccttaaaaacaacccgaaccaacccacaacgcagcctattactatcaaacttgatcccggagcagaaacgaccgggatcgcacttgtgagactaacttcatctgctcacatcgttttgcacctgtccgaactgacgcatcggggcgcaaggattagagagaacctcgatcagcggcggagtttcagggctaatcgacgaaggcgcaaaactcggtatcgcgcatcgagattcaataaccggaccaggcgtgaagggtggctggcgccaagtctgcaatcacgggtagacaacgtgacttcatgggttgcgcgttaccgatgctgggcgccgattacggcgatcgtcattgagacggtccgctttgatacgcagaagcttatcaatcctgaaatatcgggtgtcgagtaccaacagggcacattgttttcctacgagcttagagagtatctgctggaaaaattcgagcgtacgtgcgcctactgcggaaggacgaacgtgccgcttgaaatcgaccacgtgcatccgcgttccagaggtgggaccatgagccctaccaaccttgtcctggcgtgccacgggtgcaaccaggctaaagggaatcagttggtagaagactttctggctgaggagccagaacgcctgaagcgtatcaaaagtcagctcaaaagcccacttaaagcaaccgcagctgtaaacgccacgcgcgcaaaaatcctgagcggactattcaagacgaagctacccgtagaaatagcaaccgggggcaagaccaagttcaaccgggctcgtctctccatcccgaaaatgcacgccctggacgcggcatgtacaggtgatacgccagaattgctgggatggaatatgcccgtgctggctattaaagccggcggaaggggctcgtatcagcggacgcagctggacaagtacggtttcccaagaggctacatgatccggcagaaaaaagccaaaggctttcagaccggcgacatcgttcgagcatcgattgccaaaggcaaaaaggcaggcgtgcatgtcggacgcgtcgcgatccgggcgagcggttcattcaacatccaaaccctcaccaccaccattcaaggcatcggctacaaaaattgtcgtctgatccagcgagcggacggctacaactactgcaataacaaggacagcgattcatcccacggctga

SEQ ID NO: 337 - DNA, 275 bp, Unknown
  Ga0074046_10018987 JGI
gtcaactacccacgactaaaagccgtgggcttgtagaaatacgagccgacggttgaccagacccagaaagcagaaatgcaatctacgttgaaatgcaagtcaaagacccactccggagtgcttcctcagctccggaccctggaagtcttggttgacgttacgggaaaggtaaagcccggcacgatcgagacgggttcgctacgcgcggacgaggctggctttcaacatggtcgaggggagagtccgcaaggaccgtcaccttctccgcaaagaga

SEQ ID NO: 338 - DNA, 1500 bp, Unknown
  Ga0307380_10077270 JGI
atgatttacgtacagaacgcagacggaacgccgttaatgccgacgacacgggcaggatatgtccgccggttattgaagaagaaagaagctattgttatgtctagaaaaccatttgttgtgaggttagcgcagcagacacatcaagactgtcaaccccttattttggggatagaccctgggatgacgattgggtttgccgtgatacacgataacggggatcctcttttactcggagagctaaccacgcggtcagcggaaatccctgcactaatggaagaacgacgcatgcatagaatggcacgccaccgctatcgacgaatgagaaccgtcaggcgggcaaaaaaggcgggaacgatatatgacggagagcgcgaattccaactcccagggacaaaccctgacggtgacccgctcggttcgcttcattgccatgcgataaagccgaggttagcgcggttttctaaccggacacgaccggacggatggctaacaccaacggcgtcgcatttgcgggcaacgcatatccgacttgttgattatctctgttcgattttgccaatatctcggattgttattgaatacgctgcctttgaccaacagaaacttgataccccggacatatcagggaaggggtatcaacaaggtcaactcttgggatttgaaaacgtcaagcaatacgttctggagcgtgatggacacctgtgccaattatgtaaaaagaaatcacaggtatttctccacgttcaccatgtaatttggcggagtcaagggggcgcgaatacgcataaaaaccttgtgacgctctgtgacggatgccacgacaaggttcatacatcacaaaaaacaaacacaatgcttcaagaaaaaatgccggggatacgcaaacgaaagatgaagacaacgctcatcaatacgattatgccacatttttatcggtgggtagaatggaaacacgatgtcgggcgaacgtatggattcctgacaaaacacgtcagaaaagagtctgggcttgacaaaacacatgcccttgatgcctatattatcgcacttcgtggggcaccaacgacggggcgcatcaatatggatgttaaaacatttcccgtgatgtatgggaaacaatatcgtcgccataatcggcaagagattacacgacaaccagatcggaaatattataatgggaaaacgtgtgttgcgaaaaaccgggcaaaacgcgagtcacagcatgacgacagtctaactgaaatacgtcaacaattcggggagtcatatgtttctgcactgagggtcgtcaagggaacccatgctaaaaaaagtgggtttactctggtgcagagaggagataaagtcgatattggtggacatgtaaaagtcgtcagagggtttgggagctatgggacaagattactgattgagggcgaagggaagacaccaactccaacccgaaacgcctctcttcttttaaaaaacacaggcattgtgtggggggaataacatggaaaa

SEQ ID NO: 339 - DNA, 376 bp, Unknown
  Ga0307380_10077270 JGI
attgacacattacttcatctcgcgcgcgtgcacgggatgccataacaattgagtaaaagaaggagtaaacactatgtcgcttcatctcgcgcgcgtgcacgggatgccatcagcaacattgacaccaggcgcgagcttgccagagcttcatctcgcgcgcgtgcacgggatgccatcaataaattatcatgaagatctgagtaaatccaagcttcatctcgcgcgcgtgcacgggatgccatagcgtgcgcgggatgaagacaggatagacagataccagtaacaccctgtggtgagccgagctgcaggccctgtgcaaatccggtatctaatccacggcaacctactccgcttcggcggagccttataggagatt

SEQ ID NO: 340 - DNA, 924 bp, Unknown
  Ga0209647_1007495 JGI
atgtctgtctatgtaaaaaatcatgatggagcagcactgatgccctgcacagaggcaaaagcacgcaagttgttagaggcagggaaagcaaagattgtggactatcgtcctttcacgatccaactcagctggcagtgtgagggacacgttcaggaagtcacgtgtgggattgataaaggcagcagtatcacaggccttgcctgcgtgggcaatggtgtggtcttgcttgccgccgagatccagcatcgtagagatgtgaaagacaaaatggaggatcgacgggatcgacgcaaaagccgcagagcatgtcgctggtatcggcctgcacgctttctcaatcgtggaagtcacctacggagcggacggttgcccccttcgatcagaaccaatgtggaggaagtcattcgtgtggtcaagcttcttcctcttccgatcagttctcttgtcatcgaggacgtccaggtggatattgctcgtttgaacaaccccgaactcaagggaagtcagtaccaagatccgacgcgattggatgagaatttgcgcatggcctgtttgatgcgtgatggttatcagtgtcagcactgcggtcagagtgccagaaaactggaagcccatcatctcatcttccgtgctgatggcggcaaagacactctgaccaatctgttgacgctttgtgagcggtgccatcaccaactgcacaagggcaaaatcacgctcaaggtaacgggagtaagtggtcatctggaccagattgctcaacggactatgcaggggaaaacacatctatatacaactttgaggacgtttgctcctttgaccaccgtgtttggctatgaaacatccacgtaccgtaagtaccggagtttgccgaaaacgcatattattgaccattgtgtatcgcaacccttgggactggcgaagtag

SEQ ID NO: 341 - DNA, 242 bp, Unknown
  Ga0209647_1007495 JGI
gatcatagttgctaaaagtatggtgttttcggacatcctattcaaggaactaccagcgggcctcttcggaggcagcagtttgtcaggtcatcacaccctgggatgttcgttccagtcccaggctctgtggttccggtctaagggtagccgaaaggcgaaagtgatcggagcatgacaagcctgatgaacaatcgcgaggagcaattcactcttgacagaggagggcttatagctagatgtct

SEQ ID NO: 342 - DNA, 1296 bp, Human gut metagenome
atgccaaacaaagtgtatgtcatcaacaagcacgggcgtccgctgatgccctgcacaccggcgaaggcccgtcatcttctggatgcgggcaaggcaaaagtgagacacagaacaccatttaccattcagctgctctacggcagtaccggctatacgcaggaggtcatcctcggtgtggacgccggcagcaaaaccattggcctttcagctgccaccgaaacggaggaactgttctccgcagaggccaagccgcgcaacgatgtagtcgagctgatgtccgcacgcaggcagttccgccgtgcgcggcgcaatcgtaccacccgatatcgcaagccacgcttcgacaatcgcgtgcggagcaagcacaaaggctggctcgcaccctccgtggaggtcaagattcaggagcacatgaccgccatccggcgtgcctgcgccatcctgcctgtcagcaaggtggtcgtggagaccgccgagttcgacttgcagctcctcaaggccgttgcggaagggaagcctgttccgcagggcgaggactaccagaagggcgagatgtacggccactacaacgtgcgccagtacgtcctgtggcgcgacagctatacctgctgcatctgcggggtgcatggctccgtcaggaagggcgtcccgctccatgtgcatcatcttgagagccgcagggtaggcggtgacgctccgggcaatctggggacgctctgtaccgcctgtcacgataagctccacaagggcattatcatggcagcggacatcaagaagcgcaagcgccgctccacccgcgacgcgaccttcatgggcatcatgcgcatgacgctgctgcggaggctttgggagcagcttcctgtccccgttgtggagaccaggggctacatcaccaaagttacgcgggagaagctgctggtgctgccgaagagccatgccaacgacgcgctggcaatcgcgcacggcccgcagggctttcgcgcagaatatctgccaaatatccgtcaggcggaccgactttacaccatccgccctgtgagacatcacaaccgtcagctgcacaaggcgaccatcctgaagggcggtgtgcggaaggccaatcaggcagagaagtacatctgcggcttccgcctctacgacaaggtactctacaacggtatcgagtgctttgtctgggggagacgtaccagcggttccttcctactgcggcagctcaacggagaaaaggtcaaagacggcgtgagctacaaacacttaaaactattggaacgcagccaaagttatttggttgcatag

SEQ ID NO: 343 - DNA, 304 bp, Human gut metagenome
gtcaataacccccaccaaatctaatgatttggagggggcttgcgagaaaacgtaagcccagattgactaccctaagcattacgaatgctacgttactcaagaatgtatgtataggcaccggcgggcgtgaatccgaacctgccgcactgcggtgtgtgattaaaagctctgagggtaaggagcggtggtgcacacgaaaaccttgagataacattgggtacggatacctgacggccgaaaggccgcgtggctttttcgttagccacaatcaaagaagaaggaggaaggcatcatgccaaacaaa

SEQ ID NO: 344 - DNA, 972 bp, Unknown
  Ga0070698_100018796 JGI
atgtcgttcgtgttggtcgtcgatcaggagcgcaagccgctcgctccggtgcatccaggccgtgcccgcttgctgctgaacgcggcgaaagcggcggtgctgcggcgctaccccttcaccatcattctcaagaccgtcgtgcccgctgcccagcccgactcactccgcctcaagattgacccgggctccaagacaacaggcatcgccgtggtccacgacgccaccggacaggtggtgtggaccgcggagctcgcccatcgtggcgagcaggtcacggaacgcctcacgcagcgccacgcctgtcgtcggtctcggcgtcaacgccacacgcgctaccgcccggcgcgctttgccaaccgcgggcgacgggagggctggttgcccccctcgctggagagtcgcatcgccaatgtgctcacctgggtgcagcgattgcgtcactctgcgcccatcgacgccatcagcttggaactggtgaaatttgacacgcaactgctgcagaacgccgagatcagtggggtggagtatcaacaggggactctggcggggtacgaagtgcgggagtatctcctcgagaagtggggcaggaagtgcgcgcactgtggcgcgaccgaccgaccgctgcaagtcgagcatatcacgccgcaggcgcgccacggctccgatcgggtctccaacctcaccctggcctgcaagacttgcaatgacgccaaggggaagcgcacggcggaggagtttgggtatccccagatccaggcgcaggcaaagcagccgttgcgtgacgcggcggcggtgaatgcgacgcgctgggcgctcttccaccggctcagtgcgctgggattgcccctcgagacggggacgggaggacgcacgaagtggaaccgcacccggcgtgatctgcccaaggcgcattggactgacgccgcctgtgtgggcgccagcacgcctgctatactggacatgcgcggtgtt

SEQ ID NO: 345 - DNA, 275 bp, Unknown
  Ga0070698_100018796 JGI
gttagcgaccccagccagaaatggcggggcttgaacgagccccgatgctgaccagtcccctggcagttgccaggagccgttggcgaggagtgtcaaagttcacaccctgggatggcatctcagtcccaggcgctgcaatcggttggttaaacaggttgatggggtagaacagccagtgccgaccgaagatggccgctcgccaactcggacgagggaatccttacccgcgtcaagcggaggcgcgcaagcgcacgaaggagtcggagatgtcgttc

SEQ ID NO: 346 - DNA, 1323 bp, Tepidimonas sp. SPSP-6
atggctgtacttgtattggataaacgcaaacgcccgctgatgccatgctcagagaagcgggcgcggcttttgctggagcgcggtcgggcgcgggtgcattgcatggttccgttcaccattcgactggtggaccgtcgaatcgaagacagtgtgttgcaacccctgcgcgtcaaaatcgaccccggtagccaaaccacgggtattgcgctggttcgggatcaggacgatgtggacgtggacactggcgaggtgaagaaggtggcgcatgtcgtgctgttggccgaacttaagcatcgcgggcagacgatccgggatgcgctcacgcagcgccgcgcgtttcgtcgtcggcggcgcagctccaacctgtgctaccgtgctccacgttttgataaccgtgtgcgcaaggctggctggttgccgcccagtctgcaacatcgggtggatacgatcatggcctgggtgaatcgactcaggcgatgggtgccggtcacggcgataaaccaggaactcgtgcgtttcgacactcaggcgttgcaaaaccccgagatcggcggtgttgaataccagcaaggcacactagccgggtacgaagtccgggaatatctgctggagaagtggggccggaagtgcgcgtattgcgatgcgaaggatgttccgcttgaaatcgaccatatccttcctcgtagccggggcggtagcgaccgggtgagcaatcttgtcatcgcctgtcacgactgcaaccgggccaaaggcaatatgcctgtggaacggtttctggcgaaacaaccagagcgcatccgaaaaatactggcccaggccaaggcgcccctcagggacgccgcagccgtcaacagcactcgttgggcattgttcaacgcgctgaaggcgactggcttaccggtagagagcggcaccggtggcaggacgaagttcaaccgcacacggctgaatatccccaaggggcatgctttggacgccgcctgtgtcggaaatgtggacgacgttcaggaatggcaaaagcccgtactttgcatcaaggcgacgggtcgaggaagctatcagcgcaccaggctggatcggtttggcttcccgcggagctacctgacacggaacaaaagcgcctttggctttcagacgggcgacagcgtgaaagccgtggtaccctcgggcaagaggacaggcagatatcgaggccgcgtagccattcgcgctagcggaagtttcaacatccagacgccgcaaggcgtcgttcagggcatccattaccgtttctgttcgctgatccagcgggcggacgggtatgggtattcgtgggcaagatag

SEQ ID NO: 347 - DNA, 289 bp, Tepidimonas sp. SPSP-6
gtcaactaccccgcccttcagggcggagcttgcgatagcaggctcggttgatcagggaaagcggtaaccaagccgcttgcgtcggcaacaggtcgtcaagacccactccgggatgcttcctcagtcccggacactggaaggttgggatcatgctggcgaaaggtaaagcgccgaaggttccaaccgcctcgcaagagggagccggttgccgacattcccgaggggagatggggccgcaaggctccgcgtaacaagtcccgtaagggataacaggaggtacaacatggct

SEQ ID NO: 348 - DNA, 1398 bp, Human gut metagenome
atgagcacttgcgtttgtgttctcggcaacaatggtgaacgcttaatgcctaccttccgtcttggcaaggtacgccgactcttgaaagacggaaaagcaaaaatcgttaagcatcatccttttactattcaactgctgtatgacagcaaaacaaacacacaacccatcgaaatctgcgaggatgtgggctacaactacatcggcatcagcgtgaaaagcgaatcccacgaatatgtgtctgcgcagtatgatacattacaggatgagaaagcctgccacgacagttgtcgtaagtatcgccgtacccgcagaaacagactgcgttaccgtaaaccgcgcttcgataaccgcaagcgcagcgaaggttggcttgctccttctttgaggcataagaaagaactcaatgtcaacgttgtcaagatgtattgtgcagtaatgcccattacgcatgcaacggttgaagttggttcttttgacacaatgttgctgcaagccatccagaaaggcaaatcaaaaccggaaggtgtagactaccagaaaggtccccgctacaacttggcaaccttgcgtgaggcagtgttctaccgtgataattacacctgccaagtttgtggacgcaaaatcgcggatggtgccattttacatatgcaccacatgttttattggaaaggaagacacggctaccagcttgatgagttggttacagcgtgtgaaaaatgccacacgccagcaaatcatcaaaaaggtggcaagctctacggatttggcgaagataaagaatttgccaatctttcaggtgcagcatttatgaacgctgttcgctggcagatagtaaatgcattgtacgccacatacggtaaagaatttgtaaccatcacttatggcgctatgacaaaagaaaagcgtatcgcgcttcatcttgaaaagagtcataacaacgatgcgtatgcaatgggcagctttcatccagttaaccgctgcgcgtttgaacattatgaaaagatgaaacgcaataaccgcattctcgaaaagttttatgactcgcagtacattgacactcgcactggtgaactgactaacggcaaaagcttattcaacggtagaatcagccgcagccataaaaaggattccgagaacctgcacaagtaccgtggaaagaggatttgtaaagggcaccgcgctctacgccgaaaaaagttggccctcaatcccggagatttagtttctctcaacggagaaattcttgttgtccatggcactcataccaataaaaagggtgctgtaaatgtagaattcaaagcacccgcaaaaaacggtcaaaaatccgcgagccttaaaaaactcaaaattgtaaaagcagcagattccatacatcccgcatgggaaaaagtatcttaa

SEQ ID NO: 349 - DNA, 324 bp, Human gut metagenome
gtcaacaaccccgcctaagccggttcgccggttatagacggggcttgcggggcaacccgtaagcccagttgattagcctaagtctgctgctccggcggcaggaaactacgttgtgtactaataatataggcaccttactcatgctccacaagtggtgagctctgcggatgtttgttaaaaatctctgagggtaggagacgtgcaaacatcataccgaaaggtaaaacagtacaacaacattggcgaagtggaccacagggcgcaagccctgacttatagttttattactgttttacgaaaggagtgccttgcatgagcacttgc

SEQ ID NO: 350 - DNA, 1158 bp, Unknown
  Ga0190367_1011244 JGI
atgtcacccgggctgagacccggcggggtaatccccaaggtgattgatatgggaaaggggaggagtgggaagggcactgtgaagagagtaccggtagttgatgcgagagggtttccattgatgcctacgacgccagtaagagcacggcgaatgttgaaagaaggggaggcagtagcgagaaggaacaagttgggcattttctatattcagttgaagcgcgctgtcgatccggtgccgaaagaagtgcaagaaagaacgcagccgatagcagcgtccgtggatctgggttcttcctttgctggtctttcagtggtagggactaaggacacgattctcaacataatgacggagccagtgaattgggtggaagatgctctaaggaagcggcgagagatgagaagattgagaagataccgcaagtgcaggcgtcggaagaagcgtttcgacaatcgtaagagaccagagggatgggttccaccatcaacgaaggcgagatgggatacgtacctaaggataatagaccatcttaggaaaatagtaccgatcacgcatgtcggcgtagaggagggcaaagcgaggacaaagaagggacagaaaagatggaacaataacttttcccctttacagaacggcagaaactacttcattaaagagctgcaaaagagaggcttgagtgtgactttgcttccagcgcgagaggttgcgaggctgagaaagaagcatggtttgacaaaggtaaaagataaagccgagaagagtttttactcacactgcgtggatgcgtgggttatatcagcttggataacaggtgctgcgacgccgaactgtcttgatatctggtacgctgttcctttaaggtttcacaggaggcagttgcacgggttaaagccgtcaaaagggggagtgagaaagaggtatggtggtacaagatctctcggcttcaagagggggacgctggtgaaatctgggtacgggctgtgctacatcggcgggttcgacgagaaaaggaaaaggctgagtttgcacgacgttaagacggggaagagaacaacaaaagctgccaaacccgacgacatcagagttctaacttctgtcagcttcaggagtttttacattcccgcaattcccccgcaagcttgcggcacccttgcggggtga

SEQ ID NO: 351 - DNA, 306 bp, Unknown
  Ga0190367_1011244 JGI
gtcaacgaccctgggctaaagcttggcttgggttggcgggcccaagggccgaagaggcttcgttgactagcctcagtcccgcccgaccgaggcggggctacgccccgcgggctacaaggacggtggggtgctcccccagcctcacccgctccggcagaaccgctgaatgccgtggtgggcggacgctcacctaagcctgcggggcattggcgagggggaatgtcacccgggctgagacccggcggggtaatccccaaggtgattgatatgggaaaggggaggagtgggaagggcactgtgaagaga

SEQ ID NO: 352 - DNA, 1287 bp, Azohydromonas sp. 13393
atgtattccgagaactctgtgttcgtgctggatgcggcaaggcggcccctttcgccttgccgcccagcgcaggctcgccgactcctgcgcgacgggaaggccgcagtgctgcgccgctacccgttcaccatcatcctcaccgaagaaaagccgcaggctgacccgaagccgctggcgttcaagatcgacccgggctccaaggcgaccggcctggcgctgctggacaaggcgggccgcgtggtgttcgcagccgagttggagcatcgcggcgagtcgatcaagaaggggctggacgaccggcgcatgtaccggcgcaaccgccgcagccgcaagacccgctaccgcgccccgcgctttgacaaccggcgccgcgcgaacggttggctgccgccatccctgcaacaccgcgtggacacgaccatgacctgggtgcggcgcatttggagcagttccaacgtcgcgcagctgtcggttgagcgcgtcaagttcgacacgcaggcgatgcagaaccctgaagtcagcggcgccgaataccagcagggtgagttggccggcaacgaagtgcgggagtacctgcttgagaagtggcagcgccgctgtgcctactgcgatgccagccgcgtgccgctccagatcgagcatgtcgtggcgcgctcgcgcggcggcaccaaccgggtgagcaacctcaccctgtcttgcgggccttgcaaccgggccaagggcgccgatccggtggagcagttcctgtgcaggaagccggacgtgctggcacacatcaaggcgaagctcaagcagccgctcaaggacaccaccgccgtgaacgcgacacgttgggcgttgttcagcgcgcttgccgcaacggagctggccgtcgaggcaggatcgggcgcgcgcacgaagttcaaccgcacgcgacagggctaccccaaggcacactggatcgacgcggcatgcgtgggtgagagcggcgccctggtcgcgctcgatcccgccctgcgcccgttgcgcatcaaggcatgcggccatggcctgcgccagcggtgccgccccgacaaatacgggtttcctaggacggctgcgccgagggccaagttcttcttgggattccagacgggcgatctggtcaacgcccgcgtgcctacaggcaagtacgccggccggcacacaggacgcattgccatccggttccgcccctcatttcgcctgacctccaaggacaccacgttcgacgtgcatcccaagtacctcaccgccgtgcaaagggctgacggctatgcctacttctga

SEQ ID NO: 353 - DNA, 275 bp, Azohydromonas sp. 13393
cccgattcgatgaattggatggagcttgcgaaagcaggctccccggttgaccaggctcagtgattcaggagcgatcttgatgaactacgttcagacggtcatgacaccctaggatgcgtgccagtcccaggctctgtcggcaggaatcatggtgccagcagggagaaggctggcgaaggttcccgcctcaacaagccgttgggacattgccgaggcaaacattaccggccgcaaggccgtgaaggagttttgaaaccatgtattccgagaactct

SEQ ID NO: 354 - DNA, 1389 bp, Unknown
  GENOME_ACESSION: IMG_3300000053_$F_3300000053 JGI
  MISC_FEATURE (132)..(132): Any "n" represents any nucleotide
  MISC_FEATURE (150)..(150): Any "n" represents any nucleotide
  MISC_FEATURE (183)..(183): Any "n" represents any nucleotide
  MISC_FEATURE (199)..(199): Any "n" represents any nucleotide
  MISC_FEATURE (273)..(273): Any "n" represents any nucleotide
  MISC_FEATURE (288)..(288): Any "n" represents any nucleotide
  MISC_FEATURE (303)..(303): Any "n" represents any nucleotide
  MISC_FEATURE (306)..(306): Any "n" represents any nucleotide
  MISC_FEATURE (315)..(315): Any "n" represents any nucleotide
gtgagtgtcttggtactggacaaacagaaacaaccgttaatgccatgccgcagtgcacgggcgcgtcagctcttgcgcgatggcaaggccgcagtgtttcgtcgttatccgttcacgattatcttaaaaganagagtgggcggtgatacncagccgctgtctctgaatgttgaccctggcagnaaaacaaccggtgtgnctctggtcgcagagtatcagcgcggccagtgcgcagtattggctattcacattggccaccgtggtcagcagatnaaatccgcattgganggcaggcgcggtatncgncggtcacgncgaaaccgcaaaacccgctaccgggcaccgcggtttttaaatcgtacacggcctaaaggttggttagcgccatccattatgtcacgggtgcacaatgttgatacgtgggcaaagcggttaatccggcttgcacctatcattagcgccaatgtggaaaccgttcgcttcgatatgcagttgatggaaaacccgtcgatggccggcgcggactatcagcaagggtcattgtttggttgggagcttcgggaatacctgttgtatcgccacaagcatacctgtgcctattgcgatggattgacgggcgattcagtgctggagaaagaacacattattccaagggcattaggcggcagcaaccggctggcaaatcatgttatcagttgccgcacctgcaacgaggataaaggttctctgcaccccaatgcctgggcgcagctttgcatgcagcgcggtgggaaattaaatacgacacgggccaaaaacatgcagcgcattctggccggttaccggccatccttaaaggatgcagcggcagttaatgctacgcggtatgccgtgggtggcgttgttaagcgcttaataccagatacgcagttttggtctggtggccgcaccaagaaaaaccgctcagaccagggttatcacaaagaccactggattgatgcggcctgtgtcggtgagaaaggtggcgcggtgtcactgttatgcgatgctgtgcttatggccaatgccaaaggacatggttcacgccagatgtgtctggtggacaagtacggtttcccgcgcaccagcgccaaaacaacctcggtcgtacacggatttaaaaccggcgacatggtggcggccagtgtgccaacgggcaagaaacaaggtgtgtatgtgggacgagtagcggtacgtagcagcgggtttttcaacattcaaaccaaaatgggcgttgtgcagggtgtatcccacaagcattgtcggatactccagcgcaacgatgggtataactttacctatggagcggcaattcctccgacgactgattcaaagaattcagtcgcggtatccttgccgaatagttggtga

SEQ ID NO: 355 - DNA, 289 bp, Unknown
  GENOME_ACESSION: IMG_3300000053_$F_3300000053  JGI
gtcaacgacccacgacttattcgcgttgcgaattaagtcggggcttgtaaagccctaagttgaccagaccccatcaggcaacggatggagacgttatcgaagaatacataggcaccgtgggatgacttgccagtcccccgctctgcgcaaaacgattaaacaggtgtaatgggttaagccagtgtcgttttgaaaaaaccttcgaataacacggtcgaggcacacataacccacttcggtggagaacgacgggtaaccgtcataattttggagattggataacgtgagt

SEQ ID NO: 356 - DNA, 1287 bp, Moorea sp. SIO3I8
atgcgagttttcgttttagatcaaaataaaaaacccctggatccatgccacccggcacgagctagggaactacttaagaaaagaagggctaaagtatttaagcgctatccattcactattatcatgcaggacagaagtgttaataattctgtaactcatccacacagaatcaaaatagatcctggttcaaaaacaaccggaatagctgttattcaagaacagactggacgagtgacaagtgcattagaaattaaccatcgaggacagagtatcaagaattctttagaatccagaagagccttaaggcgaggtaggcgaaacagaaaaactcgttaccgcaagcctcgatttcttaatcggaagcgcccagaagggtggttacctccgtcactaatgagtcgaatatttaacgttgagacttgggtaagacgactgaggaagttgtgtccagtgactgcaatatctcaagagctagtgcggtttgatactcagaagatgcaaaatccagaagtatcaggtgttgaatatcaacatggcgagctatacgggtttgaggttaaagagtaccttcttgccaaatggggacacagttgtgtttattgtggtgctatgaatacgcccttagaagttgaacacattgtcccaaaatcaaaaggtggcagcaatcgggtcagcaacctaacccttgcttgtcggtgttgtaatcagaaaaaaggtaatgaccccattgaaaaatttttaaagaaaaaaccagcaattctcaaaaaagtattagctaaagcaaaaattcctttaaaagatgccgcagtcgtcaactcaacccgttgggaattatggagaagactacaatcaactggattacccgtcgaaacaggctcgggtggattgactaagtttaatcgcaagactaggggtctcggaaaaactcactggatcgatgctctttgtgttggtaaaaccacccctgagcaaatattactgaacggaacaaagccactaacagtaacagctaaaggtcatggtattcgtcaaaggtgccgacctaataaatacgggtttccaaaggctcatgctccttctgctaagtcgtttaaaggctttcagacaggagatatcgtcaaagctgacataaagaaaggaaaatatgccgggcagtatacaggacggatagctattcgttatcgtccaagttttgtacttcagactcccgagaagaagttcgatgttcatccaaagtatctgagaataatatttaaagctgacggatacgaatatgcgtctaactag

SEQ ID NO: 357 - DNA, 253 bp, Moorea sp. SIO3I8
gtcaataactcaccgctaagtcctatgggactatagcgggagcttgtagaagctcatagttgaccagactgagacttagattaggtctacgttatttgagttataacacctgtaggtgcgtgccagccttcagctctgttgttaacaattaaacatctgtagcgagttaaggaagtgttgttaacctctcaagctcttataacattgtcgaggcaaactttacccacatcgtggagtgttcaaagtaatgcga

SEQ ID NO: 358 - DNA, 717 bp, Methanosarcina sp. 2.H.T1A.3
atgttagttttcgtaatcaatcaaaacaaaaaaccactgatgccctgcaaaccctcaaaagccagaaagctactgcaagcaggcaaagcaaaagtggtccgaaatacgccattcacaatcaagttacttttcagaagcagtggctatactcaacctgtaactgcagggatggataccggctctaaggtagtgggctgtgcagccattgctaacggaaaagtgttgtatcagtccgaaatctacctgagagaaaacgtttcgaaaaagatggaacaacggaagatgtaccggagaacccggagaagtcggaagacaaggtatagacccgcaagatttgataaccggggaaattcaaagaaagaaggaagattggctccttctatccgaagcaaacttgaagctcatttccgggaaaagaggtttgtggaatccctgcttcctgtaaccgagtggaaggtagaacttgcttcctttgatattcacaaaataacaaatccggaagtttccgggatcggatatcaggaaggggaccttaaagggttctacaatatcaaagcttacgttctggacagggacggctacacctgccagcactgcaggggaaagtcaaaggattccaggctgcattgccatcatatcgttttcaggtcacaaaagggaacagatgcaccggaaaacctgataacgctctgtgaaacctgtcacaaagccctgcac

SEQ ID NO: 359 - DNA, 289 bp, Methanosarcina sp. 2.H.T.1A.3
gtcaactacccctgagctaaagactcaggggcttgtctaacaagccctggttgaccagatcaccgattaggagcaacggaaaatcggtaaacgataggaaagaatacatagttacccttgaatgtcgcctcagtttaaggctctaaggatgccggttaaacagtcctgagaggtagggacagtgcttgcatcgttaaacctttccatatcagatcgagaggaggacggattcctgaattgactccacaattcggatacgcataactcttcggaggaaaactatatgtta

SEQ ID NO: 360 - DNA, 471 bp, Unknown
  GENOME_ACESSION: IMG_3300000938_$F_3300000938  JGI
ttggaatctcgccgttcattgcgtagaagtaggagaaatcgtcatactcgttatcgtcaagggaggttcctaaataggactcgccctaaagggtggttggctcccagcttgcaacatcgcgtcgaaacaaccctaacctgggtaactagattgatgaagctcgcccccattgcctctattactcaagaacttgtacggttcgacttacaacaattagaaaatccagagatttctggaatcgaatatcagcaaggtgttgtatgtggctacgaggttcgggaatacttgctcaacaagtgggatagaaagtgtgcttactgtggtgttacaaatacaccattacaagtcgaacatattcatcccaaagctaagggtgattctcatcgcatttctaatctttgccttgcttgcgatgcttgcaataaaaagaaaggtactcaaggtattgagcaattcctctctaaaaagcca

SEQ ID NO: 361 - DNA, 260 bp, Unknown
  GENOME_ACESSION: IMG_3300000938_$F_3300000938  JGI
  MISC_FEATURE (246)..(246): Any "n" represents any nucleotide
gtcaacaacccggcaccgatcggattaccgatacggtgcgggcaagaaattcgccaagttgaccagtctaaatggttcgcccactacgtttaaggtaagcgttaaagtacctaccagaaaatgcgtgctagttttctgctctagaaattaaaagttaaacaggtgtaagggttaagccagtgcttttaatatagttaccgaccttaaacattgacgaagcaagcattaccccgcaagggaggactnaaatgtctaatttt

SEQ ID NO: 362 - DNA, 696 bp, Unknown
  Ga0376654_0004951 JGI
atgagcaaagtattcgttgttgatacgcataaacgaccagtaaatccgatccatccggggcgtgcccgcctcttgctttcccagggcagagcagcagtactcaaacgctatccttttaccattgtgctcaaaggagcgatagagcaaccgcagcttcagctattacgtgtcaaacttgatcctggctcaagaactagcggactcgccatcgtcaatgatgcgtctggtgaagtcgtctttgcggcggaaatcagtcatcgaggacaggccatcaaagcggctctcgatgatcgcagatctgtgcgtcgttctcgtcgccatcgcaaaacccgctatcgcaaagcaaggtttgctaatcgacgccaacccaagggatggatccccccatcgctcgccagtcgagtgaccaacgtcgtgacctgggtccagcgtttacgcaggctctgtccactcacgaacatcagcatggagttggtcaagttcgatttgcaacagatggagcaccctgaaatcagtggtactgagtaccagcagggtacgttagcaggatatgaagtgcgtgaatatctgctgggaaagtggaaccgccaatgtgcctactgtagcgcgaaggatatgccgttgcaagtggagcatattcatccccgtgccactggtgggacgaaccgggtgagcaatcttgcgctggcctgtgaa

SEQ ID NO: 363 - DNA, 241 bp, Unknown
  Ga0376654_0004951 JGI
gtcaaatacccccggctttcagccagaggcttgttcgcaagcctgaatttgaccagactcagttcttcggaactagcgctcggagcgaaataggtacgttggggtgcgcggccagccccgaccgctacggtgaagcattaaacaggcgtacgggtgaagccagtgtgtttcacgttaaaccgctccataacattgtcgaggccaacatcacctgcgcaagcggaggctctgtatgagcaaa

SEQ ID NO: 364 - DNA, 774 bp, Unknown
  Ga0070741_10036040 JGI
atgccaacccatccagcaagagcacgtgtgttgctctcatcgggcaaggcggctgtctttaaacggtttccatttaccatcattctcaacaaggccgttgagcaacccacgtgtgcccccttgcgcatcaagattgatcctggcagcaaaacgaccgggttggccattgtcaatgatacatctggggacgtggtctttgccgctgaactcgctcatcgagggcagcagatagccaaagatctggagaaacgacgagccgtgcgacgaagccgacgacaacgcacaacccgctacagaaaagcccgttttcagaaccggagcaacaaaaagaaggggtggttggctccctcgttcgagagtcgcatggtcaacatgctcacctggatcaatcgactcaggaacgtgtgtcccattgtggccatcagccaagaactggtcaagttcgacttgcagaaaatggaacatcctgagatcagtgggattgaatatcagcaaggcacactctacggctatgaggtcaaagagtatctgcttgaaaagtggggcagacagtgtgtctactgcggagcacagaacgtgcctttggaggtcgagcatatccatccacgttcaaagagccgtgacaatcgggtcagcaatctgacccttgcatgtcatgcttgcaatcagaaaaaggatgatcgcgatattcgagagttcctggcacacaagcccaaactgctagagcaactgctcgcccaagccaaagcaccgctcaaggatgcgtcggctgtc

SEQ ID NO: 365 - DNA, 286 bp, Unknown
  Ga0070741_10036040 JGI
gtcatgaacccaccggctcaagccaggggcttgcgggaggccgaagagcgttctgcaagccgaacatgaccaatctgagtccgggagaccgggctccgttacaggcgaaaataggtacgtccaggtgcgagtccagcctgcgaccactacggtacagcattaaacaggactacgggttaatccagtgtgttgtacgtcaaaccgcttgataacattgacgaggccaacgtgacctgagcgatcaggggtccgaaaggacaaaaaaggagtgactgcattgagtcac

SEQ ID NO: 366 - DNA, 882 bp, Methanosarcinales archaeon UBA203
  MISC_FEATURE (686)..(873): Any "n" represents any nucleotide
atgttagtgtttgtactgaataaacacggaaatccgcttatgcctgcatcgccagccaaagcgagacatttactggataacggacaggctgtagtcgttagacggactccattcacgatacaactattatacggttcaagcggatacaaacagggcgtcacccttggcatagacgccgggtactctacggtcggctttagtgctgtggcaggcagagaactcatcgcgggtgaattgaccttacgcaacgacattaaacgacttctcgaaaaacgaagagcatatcgccgcacgcgaagaagtcgtaagtggtacagagaaccgcgatttaacaaccgcggaaagaaaggttggcttgcaccaagcatcaaacacaaactcgatagccacatcaggctcatcgaaaaactgaagaaaatcctaccgatcacacgaatcatcgtagaggtcgcttctttcgacacgcagaagatgcagaatccagaaatctctaacatcgaatatcagcagggagaactgcagggatacgaggttagagaatacctgcttgagaaattcggacgcaagtgtgtttattgcggcaaaaccgacgtaccactggagatagagcacatcgtaccgcggtcgagaggaggttcagatcgagtctctaatctgaccacagcatgtcacgagtgcaaccaaannnnnnnnnnnnnnnnnnnnnnnnnnnnnnnnnnnnnnnnnnnnnnnnnnnnnnnnnnnnnnnnnnnnnnnnnnnnnnnnnnnnnnnnnnnnnnnnnnnnnnnnnnnnnnnnnnnnnnnnnnnnnnnnnnnnnnnnnnnnnnnnnnnnnnnnnnnnnnnnnnnnnnnnnnnnnnnnnnnnnnnnnnnnatcaggtaa

SEQ ID NO: 367 - DNA, 249 bp, Methanosarcinales archaeon UBA203
ctctccctgaccctaacgggtcgaggaaaggacttaaaaagccccttagttgatcaggaggcataagaatatgcagaagttacgcggaagaaatacatacacaccttggaatgctgctccagttccaagctctgtggcaggatggttaaacagttctgagagggtaggaacggtgctgtccagcttaaaaaccccgcataacaactccgaggagcatttactcggaaacaggaggaacactttatgtta

SEQ ID NO: 368 - DNA, 1329 bp, Unknown
  Ga0376443_00295 JGI
ttggaggtcttaaatttgaaagtatttgttcttgacaacaataagtaccagcaagcccctgtacatccagcagaagctcgattgctactaaaagagcagaaagcggctgtatataggaggtatccattcaccatcatattaaaggaggtttccaaacaacaaccagaagaactaaggttaaagatagatccaggcagcagaaatactgggctcgctgttatttctgataacaccggagaaattgtttttgccatggagttagaacatagaggcctcaggatcaaaagtctacttgattccagaagatgtgtcaggggaagccgtagaagtagaaaaacaagataccgacaacctcggtttctaaatagagctctgcccaaaggttggctggctccatctttaaaaagcagggttcacaacattgagacgtgggtaaggagattgataaaaatttgtaatatccaggctatctcaatggaacttgtacgctttgatatgcaaaaacttcagaatccagagatatcaggagtagaataccaacaaggcgaacttgcaggtttcgaggtaaaggagtacttgttggagaaatggggcaggtcttgtgtttactgcggtaaggagaacgtatcactggaagttgagcatattatcgcgaaatcctgtggaggctcaaacagggtcagcaatttaacaatcgcttgcattgattgcaatcaaaagaaaaacaacaaccctatagaactatttctgaaaaataagccagaattattgaaaaaaattctatccaaaaccaaaacacctttaaaagatgctgctgctgttaatattgttagatggaatctttatcacaccctgcagacttttggattgcctgttgaagttggctctggtggcttaacaaagttcaatcgtaaagctcgaagcttaccaaaaatacattggcttgatgctgcttgtgttggaaagagtacgcctgaaagattattccaaacacacaaacaggtgttggaagtaaaagctatggggcatggcagtatacaaatgtgcagagttgataaatatggctttcccaggacaacgtcaaaaccaacaaccaagaaagtaagaggattccagacaggagatataataaaatctgttgtaaccaaagggaagaaggttggaacatatgttggcagggtagcggtaagaaccagcggatcatttaatatcaaaacaaagaaagacacagtgcaaggtattggctggaaatattgtaagaaaatacattgcatagatggctataactacaacaatagaatggaggcggcaattccccccctgagctaa

SEQ ID NO: 369 - DNA, 247 bp, Unknown
  Ga0376443_00295 JGI
gtcaacaacccctgagctaaagactcaggggcttgcaaggtaacttgtaagcccagttgaccagtctaagtgcttagcgcactacgttagatcagaaataggtactctggggtgcttgccagctccagactctacggtaaacagttaaacaggtgtagggattaatccaatgctgtttacgttaaacctgatcataacattgacgaggcaaacgtaacccaagaaattggaggtcttaaatttgaaa

SEQ ID NO: 370 - DNA, 1350 bp, Unknown
  Ga0211577_10055383 JGI
atgtcccaagtttttgttgtcgacaaagaacgtcgtccactagccccctgcaccccgaggcgagctcgcttgctcctctcggagtgcaaagcttccgtatttcgacgataccctttcaccatcatcctcaaggagtcccacgccacagccactccacgacctctcaggctcaaaatctaccctgcgagtaaaacgacagggttggctgtcataaatgagtctacagctgaagtggtctgggctgccgaacttaagcatcgtagccaactgatcaagaaagcactggagagtcgtcgttctttacgtagtggacgacgcagtcgcaaaactcgctaccgaccagctcgctggctaaaccgcgtacgtaataatcctgtgtttaccaatacagagggggctgtcatcacaggaaagtggttgcctccctctcttcaacatcgggttgaagtagtaatgacctgggtagaacgcctccagcgctatcttccgatcacagcgctatctcaggagattatgcgctttgatacgcagaagctacagaatccggagatcagcggtgttgagtatcagcagggtactctgcacggttatgaagtgcgtgagtatcttctagaaaagtggtcacgaaaatgtgcctactgtggagctagagatactcgtctggagataaatcatatcgttgctcggagtcgtgggggtagtgatcgggtcagtaatttgaccctagcttgtagatcctgccgagagcagagaggagcttccaatttggaagaatttctggcaacaaggcccgcgttgttgatgaaactccaaagtcaggctcaggtctccttgagagatgtagcagcgatcaactctacacgttttgtgttgttagagcgcttgaaggctagaggcttgcccgttgaagtttccagcggaggagagacaaagtttaatcgtaatcagcaacaaatacccaggtcccattggcttaatgcggtttgtattgggcccaataccccagaaaatttaaaatgggatcaggtacagccgttagcaatcaaggcaatgggccatggcaagcggcagatggtcaatgttgatgcctttggattcccgaggggtaaaccgaaggggactccggttcacccatttcgtacaggtgatgtcgtacgggcagcaatacccaagggtaagtacgttggagaatacgaggaacggatctcatcaatcaagacttcagaaacaagggtggggattccaaataaaaaaggccaaggaaccatctatctacagactaaatacatcactacaaaaatatttagttcagatggctttgactatgaatttcttaccagtgaatcataa

SEQ ID NO: 371 - DNA, 295 bp, Unknown
  Ga0211577_10055383 JGI
atgttcattaaaaagagtgaactctgggctgactctcgcaaatgaagtgcggtttttccgcagctacaaccagactaagttcttcgagaactacgttattttcgtgatcatacctacgggtgcgtgccagcccgtagctctatggccattgcgttaaacagagactttggagggtgctcagtgcgcgtggcgtgacaagcgatgataacattgtcgaggcaaactttacgtgagggtctagcttcctcggaagcaaacattcgatcgctagcttcaaggctaaccaaatgtccca

SEQ ID NO: 372 - DNA, 1338 bp, Burkholderia turba
atgccgtgcagtgaaaagcgcgcgagattgctgctcgcgcgggaccgcgcacgcgtgcatcgagttgtgacgttcgttattcggctcacgcaccgtaacgccaattgcagcaaatttcaaccgttgcgcctcaagttcgaccccggtagcaagaccaccggtctagcgcacgtgcgcgacatcgtaacgccgagcaaggagtccgtcgaactcatccgcggcgcagccgtacttaatctattcgaactggcccaacgcggccggcaaatcagtgaggcgcttacggcgcgtcgggccatgcgttgccggcgacgcggtaagctgcgctaccgtgcaccacgcttctcgaaccgcacgcgctctatgggttggcttgccccctcgctccagcacagggttgatactacaaaggcctgggttcatcgtatcatgcgctgggcaccgatcagcgcattctccagcgagctcgtgcgcatcgacacgcacctgctcgaaaaccctaaagtcactggggtgggctatcagcggggaacgctggcaggctacgaaatacgcgaataccttttggagaactggggccggcgttgctcatactgcgacgcaagtggtgcgccgctgcaagtagatcacatcgtcgctcgggcccgcggtggcaccgatcgagtgtcgaacctgacgctggcctgcgaaccttgcaaccgggcaaagggggcgctgtctgctgaagcatttctagcgaagcggccaacgcgattggcgaagatcctgtcccaagcgaagcgtccactgaaagatgctgcagcagtgaacgccacacgcggggcgctgaccaacgcactggacacgatcggcctactcttggaacttgcctcaggcggacgtaccaaattcaatcggttggcagtcggtgtaccgaaaacacatgcgctcgacgccgcttgtgtcggggcagtatctgtcgtaacaaactggattagaccgatcctgtctatcagctgcaccggtcgcggcagttaccagaggacagggctcgaccgctgtggcttcccgcgcggcggatatctgacaagggcaaagcgtgtgcacggattccagaccggcgacctcgtgcgcgccgatgtaccctttggaaagaaggctggcacatacgtcggcagagtggcgatgcgtgctaccggttacttcaacattcaaagagctgggaaagttgtacagggcgtcgcgcatcggcattgccgattggttcaacgtggcgacggctacgcatactcccggataagcccggcccacgcaggcgcccgcagacgcggtgagggcccgtcgccctatcccttgtga

SEQ ID NO: 373 - DNA, 318 bp, Burkholderia turba
gtcaatcaccccggcaaagcccggagctttttgaagcactcgaaagctcgagattgaccagacctagcactgtaaagcgctacgttgtgcagagacagcaaacccaccgtcgaatgcttcctcagttcgacgctctggaagtcgcagcagcagacaagccccgggtaggtacgaaacgggctgcgacggaagcgaaggcttcacctgctgcacaacatggtcgaggggagccatacccgaaggtatgcgtcactaggcccgtaaggccaaccgcgccgaacggacttcggcggtgatcgaataggggctgccttggct

SEQ ID NO: 374 - DNA, 1593 bp, Human gut metagenome
ttgcaaccccgtgcatcaagttctgtagaccttggcgatgggcaacacacaccgatttgctgtgaatcaggagtgaggacgcagagatgcggacaggacagtgttgttcctgtcatatctgaagaaaggaggcgtaagcctatgaacagatctgacaagtcagttcttgttattggaatgaatggtatcgggcttatgcctaccacaccacgtaaagcaagacttctaatcagacaaaaaaaagctgaagtggtacgaaagatgccattcacaatcagactgcggtacaaaaccggcagtgccacgcaacatgtagaacttggcatagatacgggttctcagcatattggagtcgctgttgcggcagacggcaaagtattgcaaaaatctgagcatgtgctccgttcaacaatggataaaagagtgctgaacgaaaaacgcaaggctcagagaagatccagacgatatcgcaaaacagaataccgtcatccgaagtttagccagcatacgaaatatgtgtacgtagagaaaacagtcactcggaagaagcacaagacgcactggaagaaaatcagcaacaggtacggtacaaaccgtaaagaaggatggcttccgccatctattcagcagaaaatcgacatgcatatcatgatcatcaggagatatcaggaagctctgccacttgatacgtcaacaaatatcgaaattgcaagatttgatatccagaaaatcaataagccagatatcgaaggcattggatatcagctgggcagaatgtatcagtttgaaaatgtaaaagcatacgtgctatggaaacacagctaccgctgtcccgtctgtggtacggaattcgggacaaaaagaaaatctgatggaatcatggctttaccagaacttcaccataagcatttcagaagcagaggagccacagacaatccggatgagtatatgcctgtctgtacagtagatcatcgtgctgcagagcatggtgacagtggaatacttggaaagctgcgaaaagcagaagaaaagacaatccgtggacagagagatatgacattcatgaatatcctcagaaaacgaatgtgggaggcttttccaacagctgtgtttacatatggcaatgtgacgaatgcggacagaaaaactatcggtctatcaaagactcatgcaaatgatgcggtggcaattgccatgcacagacagatactgtctggcgtgcgaagcgttgcagatgctgcagatactacatactacaagcaggtacgcaaaaagaaacgttcactgcatgaagcaactgcaagaaaaggtagagccagaccaaatactgctgcaaaacgcaatgcaaaaaacacaaagtctttgactgtaaaaggaaagaagtactgcctgcgtgacaaagtagaatacaacggacagattgcgtggattgctggcttttcaggaaaaacaggttgtagaattcagtctattgatgacaaatatttatcccaaccaggaaaatcatacacatcaatcaatctttcagacgttaatgtactcaatcacaacaataactggatcgtaggatccatacaagaaaaatcaatataa

SEQ ID NO: 375 - DNA, 355 bp, Human gut metagenome
acaagtaaccgagcatgtcagcaccgacgtgcctgttgtagcttatgtgggtgtcctgcataggatactccgtcgactagcctgagatcgcttatacagattgcgatgactaagtttgcagaatcaatactcgaaccagtgatgcccaagttggatagagttggggcaatgtatttcagagagaacagaatgattgcaaccccgtgcatcaagttctgtagaccttggcgatgggcaacacacaccgatttgctgtgaatcaggagtgaggacgcagagatgcggacaggacagtgttgttcctgtcatatctgaagaaaggaggcgtaagcctatgaacagatctgacaagtca

SEQ ID NO: 376 - DNA, 882 bp, Unknown
  Ga0061017_10387965 JGI
atgcctacggaaaaccatgcaaaagtccgtattctgctaaagaacaaacaggcaaatgtaattaaaaggtgtccgtttacaatacagttagcgtatgatagcacgaattatacgcaagacgttactttaggtgtagatagcggcagtaaacatatcggtctttcagctaccacaaaagacaaagtattatttgaatctgatgtggaacttcggaacgatatagtggatttgctttctacccgtagacaaaaccgtagaaccagaagaaaccgcaagacccgttaccgtaagccacgtttcgataatcgtaaacgcaaaaacggatggttagcaccttcggttcagaataaggtagattcgcaccttacggtaatccgtaaaatacacgaaatcttgcctatcggtaaggttattgtagaagtcgcttctttcgacatacagaagattaaaaatcctggaataagcggtacggagtatcagcagggtgatcagttaggcttttggaatgtacgggaatacgtacttttcagagacggacacgcttgccagtgctgtaaaggcaggtcaaaagacaaaatccttaacgtacaccacattgaaagcagacataccggaggagatgctcaaaacaaccttattacattgtgcaagacctgtcatacaggataccataaaggtacagtaaaactgccaaaaactataaggcgagggatgccttttaaagatgctgcctttatgggaattttacgatggtctatgtataacaaattaaagcagatatatcctaatgtaagtctgacttatggatatatcactaaatccactcgtatagagaatggtctcccaaaagaccattacatagatgcccgttgtataagcggt

SEQ ID NO: 377 - DNA, 277 bp, Unknown
  Ga0061017_10387965 JGI
actaatacccacgggcaagcccgtggggttgcttgacaacccagagtgagtagcctaagtgaagccttttggctgaactacgttaagagagaatatatagtcacctacgagcgtaatgcctaacttgtagctctgaggtcagtgattaaacaatcctgtggtataaggatagtgttgctgatataaaacctctcattaacattggcgaaggcatacaaccgctcttcggagcgagtaattaaatccttatgggatttggaaaggagacagacttatt

SEQ ID NO: 378 - DNA, 1071 bp, Unknown
  Ga0310140_0030813 JGI
atggtaccagtattagatataaataaagttccaatgatgccttgctcagaaaaaagggcaagaaagtttatggataaaaaagaagcaaaaccatattggcaacatgggatcttttgtataatgcttttgaaagaaccaagcaatagaaattatcaaaaggtagtagcaggtatagatccgggaagcaaacgagaagggtatacagtagtaacggaaaagaaagtaattctaaatgtaactacagatacaccatattgggttaaagataaggtagagacaaggagaacattaagaagaacccgaaggcaaagaaaaactccatatagagcgtgtagaaataatcgctcatctttaagaaggattaataggctcccaccatcaacgaaagcccgatgggatgccaagcttagaatcttaaatatattatctaagctattcagaatcacagatatcaatgtggaagatatccaagctatgaccagaaaaggaaaaagcaaatggaacatttctttttcccctcttcaaactggaaaaaattccttttataataaaataaaagaaatttatccaaaagttaatttagttttaacagaaggttataatacgaaattacatcgggataaaagaagctttttcaaatcaaaagccaaattagattatatttgggatcggcataatgttgatagtcattcattatgtgagatggccttgaataaagagataaaaccatataaaggaatgtataaaatagagtttatgcaatttcatagaaggcagttacatatgaagcagccattaaaaggaaatgcccgcaagcaatatggcggaacagtttcattagggtattcgcgaggatcaattttaagatataagagagataacaaaatatattatttgggtggtactggagttactcgtaaaaataaaatagccatacatagtgtggtaacaggcaagagaataaagcaacatacaaatttatcagatatagagattatgtataataatacaattagaacgcaatttctgccatctttaaagaaatgggcatctttgtgcactttaggataa

SEQ ID NO: 379 - DNA, 254 bp, Unknown
  Ga0310140_0030813 JGI
gtcaataacccttaaataaaattaagggcttgtgcgaagaaaaatagtcaatttcttttgatcaagactaaaatattgtactagacaaggcagtatgcaaatagctggatcagctttcgttatgacaagaaggcaaagtacgttatggatgtttcgctagtctttaacctctatgattcaggtatgtcgaagcgagttggacaagggtgcgtaagcatcgtttttgtagtaaaggaaaaataagtaaatggtac

SEQ ID NO: 380 - DNA, 1515 bp, Human gut metagenome
atgggagggaacagtgagctagtcatattaacatatttaattaaaaccttatataacattggtgatggtaaccacccacaaatgtggagaaacttagtatgctgtactatttatttagtacattgtagtatacagaaagaagacgtaaatcattttattagaaaggaggcaacaattatggttgctgtattaagtagtattggcactaaattgatgccaacttctaattacagagcacggaaattacttaaaaaggaacgtgctaaaatttataagtatagaccatttactattcagttattggatagggaagagggtgatactcaaccaattgagtataaatgtgatactggatatcaacatattggtattagtatctgttcacaaaagcacgaatatgtgaatttacaagtagacatgttaaaagacgagactgaaaggcacaacgatcaacgtaaatatcgtagaactagaagaaatcgtctcaggcatagagcacctagatttaaaaatagagtttcatctaaaaagaaaggttggttagctccatctgttaggcataaaaaagaaatccatattcaatggttcaaaaaatattatgaggtaatgcctataacagatgctacttttgaagttggtgaatttgatactcaacttttaaaagcattacaaactggatctcctataccaactggtaatatgtatcagcagggacctaggtataaaataagtacattgagaaatgcaatatttacaagagataattacacttgctgtatatgtggtaatggaatacctcaaaataccatattatgtgtacatcatattggttattggtgtggagatagaacagacagactagataatttacttacagtttgtactaaatgccatgtgccagcaaatcatcaaccaggtggcatattatatggtcttaaaccaaaattaaaaaatttcaaaggtgccacttttatgacaattatcagatggcaattgttagatgagttaaaaactaactttcctgatatagatttccatgcaacttatggtagtgaaacaaaagaaagaagacgcatattaaaggttaagaaatctcatagtaatgatgcttatgtaatgggtgattttcatccaaaacatagaactgattttgtactactaaccaaaaagagatgtaataatcgcatattagaaaagttctatgatgctaaatatatagatagtagagatggatctaaaaaatcaggcaaggatttatcttctggtagaacaagaagaggtatatattctacaaaccttagatgttatagacaacaaaaagtttctaaaggaagacgttctatcagaagaaaccattatttattacaaccacatgatgttgtaatatggaacaatcaaaaatatacagtaaaaggggtacataataatggaacacgtgttatattaaagaaaaataataaatctgttaagatatctgatattaaaattattagacattgtaatggatactattaa

SEQ ID NO: 381 - DNA, 311 bp, Human gut metagenome
ataagagttaattattactttgtaataattttctagaaatcagttggggcttgtaattcttattgcaagccttattgaatagcctaagtatttcggatactacgttatataagaataatataggtaccaaggtgatgcttaccaagtcccttgctctacggattagctttaaacagttctcatgggagggaacagtgagctagtcatattaacatatttaattaaaaccttatataacattggtgatggtaaccacccacaaatgtggagaaacttagtatgctgtactatttatttagtacattgtagta

SEQ ID NO: 382 - DNA, 1488 bp, Unknown
  Ga0120377_1000528 JGI
gtggcgaagagcaccaccctcgcaagaggagaatccggcggttctatgaccggggaagtaattcacgaaaggagacacaaagtgatggcatacgttgcagtcctgtcagcatctggaaaatcgctgatgcctacaactgcatacaaagcacggaaactcttaaagagtagacgtgcaaagatctacagctacagaccgctgttcaccattcagctgcaggaccgtgaagaaggtgctacacagcctgttgagctgaagatggataccggtgcacagcatatcgggatcagtgtctgctctgaaaagcacgaatattggaacaggcgctacgatatgctgcctgacgaaaaagagatgcatgatgaggcaagaaaaaaccgccgtaacagaagaaacagccttcgttatcgcgctccacgctttgataaccgcactcacggtcataatcgcaaggaagataagtggtttgccccttctctgaaacacaaagaaaacatccacattcagcttgcaaaaaaaatctgtgcagttgtcccggtaacagacgctcacttcgagatggggcagttcgacatccagactttgaaagcctatgaagcaggaaagcccatccctgtaggaaacgactaccagaaaggtgagcggtatggttatgccactcttcgcgaggcagtctttgcgcgtgacaattacacctgtcaggtatgcggcgccaaactggatgacaagcaccatccgattttgagaatgcatcatatcggctattggaagcacgatcattccaatcgcatgagcaacctgatgaccgtttgcaccaaatgtcataccgcagcgaatcataagcccggaggcaggctgtatggtctggagccagagcttccaacattcaagggtgccgcattcatgaatacggtgcggtgggatatgtttgcacagctgaaaaaagcattgccgaatgtcaaatgccacatgacatatggtgccatgaccaagctgaaacgctcagaactcaatgtcaagaaaacgcacagcaatgatgcgtattgtatgggaaagctgcatccgaaatggaggaccgactttcagcattatcagaaagtacggcgcaataaccgagtgctgtccaaattctacgatgcacagtatatcgatacacgcgacggagagaaaatgagtggttctcagctttcctgcgggcgaaccaaacgcagtgagtccagacacagcataaaagatcttcgtggatacagagggcatcgggcaacatcaaaaaagggaaaaatatccaaaggccatatttcaacaagaagacataaatatgtattcaacaccggagacattgtaatcgtcgaaggcaagaaactgacggtttccgggacacagcattacggtgaatatgtagtgtttcgggacaaaacacatgcatctgcaaaagcaaaagaggtaacaatgtatcgacacggtgatggctgggtacgtgttgtataa

SEQ ID NO: 383 - DNA, 261 bp, Unknown
  Ga0120377_1000528 JGI
gtcaaccaccccgcccatttacttcggtaaatggacggggcttgcggggaccagaatacccccgtaagcccggttgaaaagccagttacatgttgcggaggaaatatacaataggcacttcggaacgctgctcaaattctgaacactgcgggcgtgcattaaacatcctataggggaagggaagtgtgtacgtctcggcggactgacagcaacatcgccagaatgccgtaaaaccctctgataacagtggcgaagagcacc

SEQ ID NO: 384 - DNA, 915 bp, Unknown
  Ga0209066_10011920 JGI
atggcagtttttgttctggaccgaagcggcaagccattgatgccgtgcagcgaaaagcgcgcaagaaagctgcttgccgcgggtcgtgcgcgcgtgcatcgggtgatgccgttcgtgatccggatcgtcgatcgccgcctgcaggatagcgcgttgcaaccgcttcgcgtcaagatcgacccgggcagcaagacgaccggactcgcgctcgtgcgcgaagtcgattcgatcgatgtttcgagtggtgaagtgcgccgcgaagtcttcgtgctcaacctcttcgagctggtgcatcgaggtcgccagatctcggagacgctcacccagcgcagtgcctttcgccgtcgtcggcgtagcgcgaatctgcgctatcgcgcaccgcgcttcctgaatcgcaagaagggccagggctggctcgcgccttcgctgcgccaccgcatcgagaccacgctcgcctgggtgcgtcggttcgagcactgggcgccggtcaccgcgctctcgcaggagctcgtgcgcttcgacacgcaaaagatggagaacgccgagatctccggcgtcggctatcagcaaggcacgctcgcgggctacgagctgcgcgagtatctgctcgagaagttcaaccgcacctgttgctactgcgacgcccaagatgtgccgctcaacatcgagcacattcacccgaaggcgcaaggcggcacgaaccgcgtttccaatctggcgatcgcctgcatcccgtgcaacacaaaaaagggcgcgcgctcaatcgaggtctttctcgcgaaggatcctgcgcgtcttgcacgcatccgggcgcagttgaagcgtccgctcaaggacgcggccgctgtcaatgcgacccgctgggcactcttcgaggcgctcaaatcaacggggctgcaagtcgaagtcggcagc

SEQ ID NO: 385 - DNA, 316 bp, Unknown
  Ga0209066_10011920 JGI
gtcaattacccgccacctggcgtaaccgccgaggtgggggcttgtgaacaacaagcctgattgaccaggcccagctgcgatgcatcgcagctacgttgcaacgaagtacaagacgcaccgccggatgcttcctcagtccggcgctctgcaagcggcagcagcagacacgccttcgggttggcacgaaacgggctgtcgcaagatcgggatcatcgatcgaagctgcgttgcaacatggccgaggggagcggcacgaccggaagggagtgcccgtaacaaggcccgtaagggcatgcattaaggagtcgacatggca

SEQ ID NO: 386 - DNA, 1182 bp, Unknown
  Ga0373621_017898 JGI
atgaacaatatctaccaggacaaaccgctacaagcaccggcggatgcttctccagtccgccgctctgctggctgcgcccaagccgatgaccataagaggtctaagcggagttctgctggtcgaggagagaatacttcccgaaagggaaggccgattatcggcaagcatggcgtgtgggtggtgggggtggacgggaaaccgttgacccccacctctcccgcccgtgcccggaagttgattgaggatggtcaggcagagaaggcgtggaataagtttggagtattcggtatcaggatgttggtagccgtcgggaatactaccccgcagacgaccctgacggtggacaacggcacgaagtacgaaggctatacggtagtctgtgggacggagaacaatcaggcggtgaaccttaatctgcctgacaagaagaagattgtgcgaaaactggaaggccgtcggcagatgcggcgggcaagacggcaacgcaacacccgacggagagcggcgagatttgacaatcgaagtcgcaatggtttcattgccccgagccagatggtgatggtcaattcccggctaaagatcatcaatgaacttgctcggtgctatccgatttcggatgcggggattgaagatgttcgttttaaccatgcccagcatcgttggggagtgaacttctcaacggtggagattggcaagaatttgattcgggagttctttaagtctcggggcattaagatatttgagtttgcgggttacgagacgaaagaactgcgatccaaatacggctataaaaagattaaggataagtcggcggatcggtttgaagcgcattgctctgacgccctggcgatggcctgcgaagtcgggcctggggaacgaattgagcttggaccattggttatcgttgacgacacctaccgcccggttcgacggcagttacatgacacccaaccggcaaagggcgagattcgggcgagttattctcggggtacggtgttcgggttgagaaagggcctgctgattggccgccccgatggacagatggggcggttgtgcggcgagtatcgggggggataccgttattttgattcaagaggcaatcgccaatcgactaaaaagctgttatttatttcggatcaatttataaccagaagggaggtgggcgcttctcccgccccttaa

SEQ ID NO: 387 - DNA, 293 bp, Unknown
  Ga0373621_017898 JGI
gtttgatcgttcatccttggaagctgcgggagtttcacgaatgccgaatgcgggagatgtagtttgcgcttggaatcgttattatgatattattcagcaggaactaatgggttatcttgatgacataaactatttcactcaagttcaatgcgatttgaagaatcggtcgaagtttgaacctcagagaaagattgtataaggagaaaaagagtcaactacccgccccctaaaggggacgggcttgtgtaaggactatcacaacgtaagagttgactaggccaagagaggttcag

SEQ ID NO: 388 - DNA, 1632 bp, Unknown
  Ga0209726_10008685 JGI
atgttgaccagggtaagcaggattagggcaggcaacccgcttgagtcttgctccgttgcggatagtgccaaagaccgacggcagagtgcttctccagccctgccctctcgaactcacgccagcagacacgccgggtcaggcacgaaacggggcgcgagagacgaccggtccgcaacattcccgaggagagccttcgagacggatgccaatctcgacgcgtcacggcccaagggtacgaccgaaggccgtctcgtcgcgaggggtaacccccgcgttttcgttctcgaccggcatggacgcccactcatgtcgtgccgattctgccgggcaaaggaattgctcgataagggtcaggccgttgtctacagtatccgccctttcacgattcgtctcgttgaccgtgtgggtggcgcggtccaaccggtccgcgccaagatcgatcccggctcgaagatgaccggcatcgctgttgttcgcgatgttgagcacgttgatgcaacgacaggtgaagtcacccgcgaagccgtggtgctgcacctgcttgagttagagcatcgcggcgcgacgattcgaaggcgccttcagcagcgtcgcggattccgtcgccgtcgccggtcggcgaatctccgatctcgcgccccgcggttcgacaaccgaacaagacccgatggctggctcgccccgagcctacaacaccgggtcgtcacaacaatgacgtgggtctcgcgcctgagacgagcgtgtcccatttccgctctctcggttgagagggtacgcttcgacactcacgctctcctcaacccggaaatcgatggcgttcaataccagcgcgggacgttgttcggcacggaaattcgtgagtatctgctcgcgaagtggagccacgcctgcgcgtattgtgacaaggcaggcgtgcccctgaacacagatcacctcgttgctcaggcgcggggtggctcggatcgggtgagcaatctcgtgatgtcctgcatcgactgcaacacacgaaaggccgatcggctgatcgaggagtttctcgcgcatgaccctgagagactcgcgagcattctcgcgcaggcaacggctccactgagggacgccgccgcagtcaacgcaacgcggaatgccctgttcttcgctcttcgggacacggggcttccaatcgaagccggaactggtggtcgaaccaagtggaatcggtctcggctcgacatcccgaagacccacgctctcgacgcagcctgtgtcggcattgttgattcggttgccaactggcagatgccggtgctctcgatcaaggccactggccgtggaagccgaaagcggacgcggctcgataggtacggcttcccgcgaggctacctcatgcgggggaagaccgttcgaggattccgaacaggcgatctcgtccgggccgtggttccatccggcacgaaagcgggcacgtggacgggccgggtagccgtgcgggccaacggttcgttcaacgtacagaccccggccggcacgatccaaggcatctcacacaggcattgccgcctcctcatgcgaggagacggctattcgtacacgatcgaagtagcgctcctccccgccgtgaacggcgaggtttccgcgccgggagaaatttga

SEQ ID NO: 389 - DNA, 327 bp, Unknown
  Ga0209726_10008685 JGI
ttggcaatcaagacaagcacaatctttgaagtccaagacccgcaaggtttagccgtcatcctcgaacgcaatacatggcagcacattagcggtggtcatcccgaaatgcgagatcgcctcgatgatatcttccaggcaatcaagacccccaatttcatccaaaaggaccctcttgatcctgatagccgacgctattattggttgaaaccaacttcatttgggaaacactccaggctgtatgtactggtggttgtagggatagacaaagagtcggtaaacgggaaagtgcgcactgctcatctggttgaaaaaccgaagaagggaaca

SEQ ID NO: 390 - DNA, 918 bp, Unknown
  Ga0376502_004060 JGI
gtggatcacttgcgaatgcaagggcagagcttgagagtctctgccaaaataatcaaaggaatctcaatgagcgtttgtgtaaaaaatatgcggggcggcacattgatgctgacgacaccgcaaaaggcaaaaattctattgaaacaaggaaaggcagtcattgccggctatcacccgtttaccatccagctgaattatgctaccggtgaggccaggcaggctctggttcttggcgtagatgccggttttaaaacaatgggagtttcaatcaccggcccgacaaaagagttctattcttgcgaaatcagcctgcttgagggacaggtggaacgaaataaggaacgaaggatgtaccggattcaaagaagatcccggctgcgtcacagaaaagcacgctttgataatcgcaggagaagtgacggttggctgcccccaagcatccagcataagcttgatagccatatcaacatcattgagcggctgaagtccgtattcccgattgcaaataccatcgtggaagtggcggcctttgatattcaaaaaatcaagatgcctgaaattaacggcacgcagtatcaggaaggggctcaatcaggattctggaatctaagggaatatatgctgcaccgtgataaccatacatgtcaaaatccggactgcaagaacaaatccaggcatcccgttttggaagtacatcacatagggtattggaaattggacaggtcggacagaccgggaaatctgatcacactatgcaacaagtgtcatacaccggccgaacataagaaaaatggttttctctatggttgggaacccaaaaccaagtcgttcaagccggaaacattcatgagtacagtccgttggaaactggtgaatacacttaagtgcgaccacacatacggttataagacaaaacaa

SEQ ID NO: 391 - DNA, 312 bp, Unknown
  Ga0376502_004060 JGI
gtcaacaacccctcggctgaagaccgaggggcttgtggggaagcccgcaagcccggttgattagcctcagccctgcgttattggtaagcggggctacgttactgcagaatacataggtacttcgggatacagatctgaccaatcgtccacacgtcccgaatgttacggtcagtgtttaaacatctgtgagggtagcagaagtgatgctgatattaaaaacctgcggataacattggcaatgtggatcacttgcgaatgcaagggcagagcttgagagtctctgccaaaataatcaaaggaatctcaatgagc

SEQ ID NO: 392 - DNA, 1242 bp, Oribacterium sp. NK2B42
atggtttatgtgataagtaaagaccgacatcctcttatgcctacaatgcggtatggcaaagtgagacggatgcttaaatcaggtcttgctaaagtaataaacagatatccgttcacaatacagcttttatataatgctacagattatacacaggatgtattattaggtgtagatgcaggcagtaagaacataggattatcggctacgaccattaaaaaggtattgttcgaagccaaagtcacactaagaaacgacatagttgaacttataggcactagacgcgagcagcgccgtacaaggcgtaaccgtaagacaaggtatcgtaagccgcgattcgataaccgtaaacgttccaataagtggttagctccatctgtaagacagaagatggagtctcatatcaacatggtacagaaggtgcataagattctccctgtatcacgtataaaggtagaaacagcttcctttgatatcaagaagataaaggcccccaatatacagggtactgactaccaaaacggtgaacaaacggggttctggaatacaagggaatacgtactgtggcgagacggtcatgtatgccagtgctgtaaaggcaagtcaaaggataagatacttaatgtccaccacatagaaagtcgtaaaacaggcggtgattcacctgacaacctcgtaacactgtgcgagtactgtcataaacagtatcatatgggaaaaataaaactccctaagacgatacgcaggggaatgagcttcagggatgcatcatttatgggtatcatgagatgggcggtgtatgacagactgaagggattatatcctgatgtaagcctcacatatggatacatcacaaagaatacacgcatcaggaataacctgcctaaagaccaccatatagatgcacggtgtatcagtggcaacccgacagctgaaagtgatggcacagtatatatctataagaaagtacggtgtcataacaggcagatacataaatgtaagatactaaagggcaacatacgtaaaagaaaccaggcaccatataaagtacatggattcaggctgtatgataaggttctgtataataatgagctgtataccatatatggacgaagggccagtggttttttcgatataaggaaacctgatggtacaaaagtcaataatggaagtatcagctgcaaaaaactgaaactcgtggctatgcagcatggctatatagtagacatgactgcatccgcatga

SEQ ID NO: 393 - DNA, 282 bp, Oribacterium sp. NK2B42
gtcaatgatacccaccacctaaaggtagtgggcttgcgtaaaaacaagctatgttgactagcctaagtgcctcggcactacgttaagagagaatacatagtcacctgtggatgtagtaccaagtctgcagctctgaggtcagtgattaaacagccctgtggtataggggcagtgttgctgacaaaaacctctttttaaccttggcgatggtacaccaacggtcagatatgtaccggcttacagcataaaacatatcaatacacgaaaggagtaccgcatatg

SEQ ID NO: 394 - DNA, 735 bp, Unknown
  Ga0099364_10003290 JGI
atgcctaccgctagaaacggttgggtacgtagggcgttacgtagtggacgtgcggtcgttacttcccgcatcccgttcactatccagttgtgctatgattctactgaacatgtgcaagaatgcacttgtaaagtagatagcggaagtacgtttgttggaatttcagtaactacaggagaaaagattataaaagaggtattcgcagcagaagcacacctgagaacggatattgttgagttgctatctgctagaaaggtgcttcgtcgaaaccgtcgcggtaggaaaactcgttatcgtaaggctagatttaagaatcgtaaaaagcctgatggttggcttccgccttctgtgcgttggaaacttgatgcacataagcggctgattgctatgttgcataagtttttgcctataagtgacattttagtggaaactgcaccttttgatattcagaaaataaataatcctactatttctggtattggttatcaatgtggagatcagttaggcttccagaatgtcaaggaatatgttttgtatcgagataaacacaagtgtcagatttgtggtaaatcgaaagtgaaacttcatgtacaccatattgagtcaaggcaaacaggtggagatgcgcctaataatttggttgctttatgtttagaatgtcatgatatgttgcataaaggcgaagtaaaattaaagaaaaacgagggcaatcttttcgcgatgcaacacagatga

SEQ ID NO: 395 - DNA, 278 bp, Unknown
  Ga0099364_10003290 JGI
agagctccgctcataaagtaaacaacccacacgttttattgcgtgagacatattagtctttgtttactagattaagttttaatgcccggctttcgttcgggaacataactacgttgattaggaaatacataggcacttcgggatacttgtcctagtcccgaatgctgcggtttatgattaaaagttctgatgggtaggagcggtgtcataagcttaaaaccccttttcaacattatcgaagggcacctcacgggaggaatcccgtcttatagaatttt

SEQ ID NO: 396 - DNA, 1116 bp, Human gut metagenome
atgagtgtgttcgtggtagggctgaacggatgccggctgatgcctacatctgaaagagaggcccgtttattactgaaacatgggaaagcttctgtttatcggaaagtcccatttaccataaaactaaattataagacaggcagtaccacacagcctggttatttgggaatcgataccggatcgcagcatatcggagtgtccgttgtccgcgaagatggtaccgtgttacataaggaagagatcggtctcagggattccatgagtaaaagaaaactgatggagtcaaggtcttcattaagaagaggaagacgtcatcgaaagaccagatatcgccatccaaaatggagactaaaagccaaacgtgtttattacgaaactccagaccgaaaaggaagacactggaagaagcaaaagatcacgttcgcgtccaaacgaccgcagggctggcttcctccatcgctgcagtcaaagacggatcatcatatccagtggatcaagaagttacaggatcttcttccagatggatatcgtctttcgatcgaacttggtcgtttcgatccggcaagaatgaaagatacagagatccatggagatctataccagaaaggaccacagtatgactatgaaaatgttcgtgcttatgtcctcgatcgtgacagatatacttgtcaggtatgtggaaagaagggtggaaaattacatatacaccatatcctgtacagaagtcatggtgcgaccgataatccacagtatatggctacgatatgcagcgattgtcatagcacagagaaccatcaaccgggaggcatcctttatcagtggatgcaggagcagaagaaatttaccagaggactaagagatgctacattcatgaacatcttaaggaaacgtctgatgaaagcatttccaaaagcaacttttacctatggaaatatcacaaaagcagacagagagaaactgaagattcctaaaagccatggaaatgatgccactgcgatcgcaatcgtaaaaactgggatcatgacggtaaaggataacgaacctgtgatctatatccaacaggtccgaagaaaaaaacgttctctgcatgaagaaactccgagaaaaggacgcaaa

SEQ ID NO: 397 - DNA, 320 bp, Human gut metagenome
tagaataaccgagcatgcagaaatgtatggatcagttatctgtagtacctgaaagggcatgctgactagactaagcacaacggaacttacagcttccatgctgtgaaggataccattagtgctacgtcccagatatcaatacccgacccggtggtacctaagccggcacagggttcaggcaacggatgtcttcccggagaagaagataccgacctggtgcaggaagtatccggaacattgtcgaagggtgaacactcccctgtgggagggcaggacttttgcgtacctgccataataacataaggagggaccagccatga

SEQ ID NO: 398 - DNA, 1368 bp, Unknown
  Ga0209948_1000490 JGI
atggtatttgtattgaataaaaacaaagaatcagttatgccttgcagtgaaaagaaagcaaaaaagttattagaaaaagaaaaggcggttattcaccggcttgtgccgatggttataagactaaaggaaaacaaagattatgaaataaaaggtttgagattaaaacttgatcctggtgcaaagacaacaggatttgcagttctgatgcaaaaaagcaaaaacgaagcggatgctattttgttaggggaaattatacacaaaacaagtattaaaggcgcattggatgacaggcgttcaatgagaagagggaggagaaacaggaacacgagatatagacctgcaagatggttaaacagagcagcttcaaggaagaaaggtttatccccttctcttgaatcgagattgaatcaaaccgttcacgctgtacaaaaattaatgaagtggttgccgataggtgcaatatcggtagaacacgttaagtttgatactcagaaaatggaaaacaatgcaatagaaggaaccggataccaacaaggcacattagcaggttatgagatcagagaatatttactcgaaaaattccagagaaaatgcgcttattgtggggctgaaaacataccgcttgaagtagagcatatatacccaaagagtaaaggcggcacaaacaggattgacaaccttgcaatagcttgcaacgattgcaacaaagacaaaggaaacaaattacctaaggtatggcttgaagaattgcggacaagcaaaaggaaatcagacaatgacagagcgaagaagtttgaaaaatcactcagagatgcaaagaaaacactgaaagatgctgcggctgttaattcaaccagatggcgtttatatgaaaaaatgaaagaacttacacccttcgttgaatgtggttcaggagcacttaccaagatgaatcgcattcggcataatttgcctaaagaacattactttgacgcttgttgcattggaaaaagcacgccggaaataatcaacattaaaacaaattatattgaagaatggaaagcagttggtagagggaaaagacaaataattatgcctaataaatacggattcccaagaggacacacgtattttttgccgaaagataaaaacgggaacaaagtaggacacaggagaagaaagaaagttaaaaacggattcatgaccggtgacattgtgaaaggcacgcaacccaaaaaagggttgactgtaaccggtagatgtgacagcgtgaaagccacaggctctattatggttcctcacaacggtaaaagaatagcgtttagctctaaaaacaccgttttgattcagcggggagatggatggcaatattcaaaacgtaaaatataa

SEQ ID NO: 399 - DNA, 309 bp, Unknown
  Ga0209948_1000490 JGI
agcgtttatagaatttgcgtcaaggttccagttttaaacgtttatagtacctcagcttcggctgattgaaccagactaagttccaagagaactacgttattcaggttatgacacctccagatgcttctccagtcgggagccatgtcgctatgctttaaacaggcttaaaggtattcagggaatgccagtgagtatagtgtaaaaagcctttataacattgtcgaggagagagaacgaaagttccgtaacaagccgcgtaagcggaaacccttcggggttattttgaataccagaggaggaaaaattatg

SEQ ID NO: 400 - DNA, 1221 bp, Unknown
  Ga0123355_10000410  JGI
atggctgatttttgttttgttattgacgctgaaagtaaacctttagcacctacgaacgttaatcgcggttggtaccttattcgtaaaaatcgcgccgctttagtagaacgttttccaatggtaataaaactacacaaaattgtagaaaatccaagttgcaatacaactcttggaattgatgacggaagtaagtataccggtattgcagtaattcaagaatgttccactaaaaacaaatgtgtattcaaaggcacattggaacaccgacaagatgtaaaaaaattattggaacagcgcgctagatatcgtaaattacgacgtttcaacaaacgacatcgtaaaccgcgtttcagtaatcgtaaaaatagcaagcgactcggaagagtagccccaagtattttacagaaacggcaagcagtaatccgattactaaacaaactctgcaaatggatacctattaaccatatcatccttgaggatgtatcaattgatattagggcacttaccgatggatataggccttacaagtggcaatatcagaaaagcaatcgtttagacgagaatctgcgaaaagcaacaatcatacgagatgacaataagtgttgcaaatgcggaaaaagaaatcaagaattacaagtacatcatattgtaccaaagcgtatgaaaggtgctgatatattagctaacttgattacattgtgcgttaaatgccacgaaagtataaatggttgtgaatatgaatttatacaactattccaaaaaaagatagagggtcaaaatatacgatttgattacgctcaacatgtaatgcaaggcaaacattggttaagaaaccaattatcaattcttgcaactctggaattaacagacggtggcacaacagcaaatcataggattgattggggcatagaaaaatcacatgttaacgatgctgttgttattacaggattatatccaacaatcttgtcacaaaaagattgggatataaggcctaaacgtaaaaaacgcaaaatgaaacataaggttgatgtttgcggttttcgacatggtgattacgctaaatatactgatacaaaaggtgttacttggtcagggtatataactgctatatatcccgataaaaagcagtttaatttacagtgcaaaacaaaacatttgaaacgggttaatgctacaaaaagtacattgttggccaagtacccacaattgtccatgttttag

SEQ ID NO: 401 - DNA, 278 bp, Unknown
  Ga0123355_10000410 JGI
taaacaaatgtggacacaaatggtcatatgtttataactattgagggggtttcaagcctaagtgagtgccgtaaagcgaaagcatactgcacgacgaactacgattagcgggtaagttaaagacgcaccaatggatgtatgcatcagtccattgctctgcgagtgaggcaggatggccgactactaatgtcctgtagtcaaacaccgaatcacatgaacttccgtctgtcattggcaagaagcaaagttccatgaaagtgagggtggtcagaaatggc

SEQ ID NO: 402 - DNA, 1194 bp, Unknown
  Ga0134588_000160 JGI
atgctagtttatgtgttaaacaaaaatgggttaccattgatgccttgcaaaccagcaaaagcaagaaaactgttaaaagctggtaaggctacagtagttagaagaacaccgttcactattcaattaaattgggattatgaaaatcacattcaatctgctactttgggtgtagatgctgggtataaggtagttggtatatcagcagttaatgaacaaaaagaattatttgctacagaagttaagttaaaaacagatgttagtaaaaaactaactgaaagaagaatgtatcgtagaatgcgtagaaacaagctatggtatagaaaaccaagatttctaaacagaaaaagaaatgatagctggttaacaccaagtgttcaacacaggttagatagtcatttaaaggctattaagtttgtatgctcaatcttaccaataagtaaaataaatattgaaacagctaaatttgatattcaaaagattaagaatcctggtatttcaagtactgaatatcaaaatggtgaacaaaaggatttttggaatgttagaaattatgttatttatagggataatcatcaatgtcaatattgtaaaaaatccaatatacctcttaatgtgcatcatataaaaccaagaaaagatggtggtactgataaaccagataatttaataacgttatgtgaaacctgtcatcaattatatcataggggtaaaataatattaggtaagattaaatattcaaaggagttcaaagcagagagttttatgagtataattagatggagaatatataatattctcaaagctatttattcaaatgttaattttacctatggatatataactaaaagtaaaagaatagaacttggtttatctaaatcccatgtaaatgacgcttttgttatagctgggggcacagagcaaaatagaatagaagtattggatagttattttaacagaagaaataatagatcacttcaattgaatagaaatggttttaaaccatctgttaggaaacagaaatatcaatatcaaccaggtgatatagttagcttaaataatattatctattttgttaaaggggtatttaacaaaggtaaatatataaaattaatagataagtacaaaaatatagttaatgttaatattaacaaagtgaggttaataacttatggtaaaggattacaattcatctga

SEQ ID NO: 403 - DNA, 258 bp, Unknown
  Ga0134588_000160 JGI
gtcaactaccaaccacttatagaagtgggggcttgtgagaaacaagttagttgattagggagcttatgtatgagtaagcagcagttatcaagaagagatacatacacacctacagatacttctctagtctgtagtaactgtgatctatcattaaacatgcatgagagggtaagtgcaagtgtgatagatttaaaaactcttgataacaatcccgaagagaaccaaccatatctgatagtgggctttataagcaaaagt

SEQ ID NO: 404 - DNA, 1245 bp, uncultured Clostridium sp.
atgacaaattatgtttttgtaatagatgctaatggtaaacaattagcaccaacaaaagaacaaaaagcatggtatcttattcgtaagaaaggtgctacattagttaataaatatccaatggtaatacaattaaataaagtgattaaagataataatatttgtaaagatgaaattcgttgtggaattgatgatggtggacttcatgtaggaattgcattaattcaaagatgtcaaacaaagaacaaggttctttttaaaggaactattgaacaacgtaatgatgttaaacatttaatgcaagttagaaaaaaatatagacaatatcatcgttatcataaaagatatagaccagcaagatttaataatcgtagttcttctaaaagacagagcagaatagctccaagtatttttcaaaaacgtcaagctataattagagtaataaatcaattaaataaatggataaatataaaaaattattggcttgaagatgtttctatagatataagagcattaacagatggatacaaaccttatagttggcaatatcaaaaatctaatagattagacgaaaatattcgtaaagctattattttaagagatggctgtaaatgtatggaatgtggtaaagcaaattgtagattagaagtacatcatataaaacccagaagattaaatggttcaaatacaatagataatttaatcatattatgtaaaaaatgtcatcaaaagacagagggtaaagaagaattgtttatgaacaaatatttttctttattgggtaaatcaaaagataataaaaatttaaattatgcaagtcatgtaatgataggaaagaattggttaagagaacaattgtctaatcttggtgaattatatttaacaaatggtggagatactgcaaataaacgaattgattggaatatagaaaaaacacattctaatgacgcaatatgtataactgaattaaaacctgacacaacagatataaaagattggattataaaagctatgcgtagacaaagtaaagctaaaacagacaatgtattaggaataaagcatagagatttagtggaatataaatataaaaatggagaaatacatagagggtatgtaacagcattgtatccagaaataaaggcattaaattttcaaagtccaacgaagcattgtaaaaaagtaaatgctcgaaaatgtaaactactttggaaatataacaaaatatattggttagataatgtgaattaa

SEQ ID NO: 405 - DNA, 289 bp, uncultured Clostridium sp.
tgtttgaacatagacaaaagaggacagattaaatcttttgtctatgtcttagcaataggtctcaaggcttagtgactgctactatcgaaagatatgttgcagatatgaactacgttgtacagtaaggtaaagacacaccaatggatgtaattctcagtccattgctctgtgagtgccaatcaagaaacaatgctaatgtcctgcattgataacagagaaacacatatcctctgtatgacattgccaagaggaaaaatactccgaaaggaaggtgtcagaaatgacaaat

SEQ ID NO: 406 - DNA, 795 bp, Unknown
  Ga0066903_100182758 JGI
atgagctgcgatcttttcgaatataacaataggcgccccgggatgcggcgccagtcccaggctctgatgcttgcgattaaacaggcgacgaacgcgaagccagtgtcgcaagcaaacaaaccgcaacggtcattgtccgggcgaacattacgtaacagcgctgtcgcgtcgaaatcgaaaggtttctttgtcgatatgagagtagctgttttagacgcgaccaaaaaacctttggcgccgacgaccccgcgccgcgcccgattgcttttgaaatcaggcaaagcagccgtctttcgtcgctacccattcacgctcattttgaagagggaggtggtcggcgttcaaacgcccgatctccgattgaaagtcgatcccggctcaaaaacgacaggcgtcgcgattgttcatcgagaagccggcgaggtcgtcttcgccgctgaaatcggacatcgcgggcaggcgatcaaaaagagcctcgatgcgcgacaaggcgagcttgggggctttgaactgcgcgaaggcaaaagcgcgcctgagaaagtcgagatcgcgaatgcgcgaccgcttcggatcaaagccactgggcagggaacgcgacaaaagtgttcgacgaacaaatatggctttccgatacgacatcgaacagggcggaaaacattaatggggtttgaaaccggcgacatcgtgaaggcggacattccgagaggcaagtatgcgggtagatatgtcggacgggtgacgattcgtcaaaggccgtctttcattttgaacggcttcgatacgcatccgaagtat

SEQ ID NO: 407 - DNA, 292 bp, Unknown
  Ga0066903_100182758 JGI
atctgctatgccgcgagcgtgacaacgctttcggccccagctcaactctcctccggcgtctctcgaaagatagcgtcgtgagcgtcaaacacgatgagctgcgatcttttcgaatataacaataggcgccccgggatgcggcgccagtcccaggctctgatgcttcgattaaacaggcgacgaacgcgaagccagtgtcgcaagcaaacaaaccgcaacggtcattgtccgggcgaacattacgtaacagcgctgtcgcgtcgaaatcgaaaggtttctttgtcgatatgag

SEQ ID NO: 408 - DNA, 849 bp, Microcoleus chthonoplastes
atgctacgagtaccagttctatcaaagagaagattcaataaccgtaaacagggtaaactacctccctctattcgagccaacaggcagttggagttacgagtagtcaaacaactgtgccaactatttccgattagtgcgattcactacgagctagtcatggctgacgtagataggactaggggaagaaaattagcacgatccggcgttggcttctccccggtcatggtgggacaaggacaaatgctgacttggttatctgaattagctccagttacaacccacaagggatggcagcgagacggcaatggaaccagtcaactcagaaagtggctgggactacccaaggataagaagaataaagcttgctctacacctgcgacccatgctgttgacggtgtaattctagccgctttcgagttcattcaatggcgcgaatggcattctgatcatactaagcacggtgactggagaggtgatgttcagattacacccgcgccatttacgatcatccgcagacctccaatcagtcgtaggcagttgcatttatgtgtcccgtctaaaggtggaaagcggcgtaagtacggtggcactgttactcgtcacgtagagacgcgccatggcgcgtctttacgcaagggtgatcaggttatcgctgaaaaagccgggaagtcctatgttggttggtgttctggtgatactgatcaagcgatttcggttagtgatgctaactggaagcgacttgggcagtttacggctaaaaaagtccgattgttgcagcgaagcacgggattaattgtcgcgccttcagttggattgtcaaacctaaccgcatcgagcggcgcggtttga

SEQ ID NO: 409 - DNA, 275 bp, Microcoleus chthonoplastes
ttcaacaaccccaacctacttcgttgaggttggggattgccggacaaacggcaatttaaaccgttgaataccgcattgagtctcggtttggcacagacacccggatacttccctagtccggatcaaatctaaagccttttgtcgggctgttgtaagacaagacatcttaaccgagatggcgggaagggactacatttcgacttatctcgacttcgctcgatacaagtcgctcaatgtaaacactttcactcgtgaggattatctccatgctacga

SEQ ID NO: 410 - DNA, 870 bp, Unknown
  Ga0376082_0035695  JGI
atgtcaaactacgtctttctaattgaccgcaaccaaacaccgctaaatccagtacatccaaaacaagctagaaagttgttggatgcaggcaccgcagcagtgtttcggcgatatccgttcactttaatactcaaacgagttattgacaatcccaacgtttatcctctgacacttaaaattgacccaggctcaaagtttactggtattgcgctagtaaccaaccaagggaatgtcatttgggggatggaattgcaacatagaggtcaacaaatcaaaaacgcgctcttagcacgtaaagcactgcgtagaggacggaggaatcgcaatactcgttatcgtcaagctcgattcctgaaccgcaagcgtccaaatggttggttagcaccatctttgaagcatcgcgtcttgacaacccaaacctgggtcaaacgaattcaaaagtttgcttcaattagttcaattgttcaagaactggttaagttcgacacccaggcagtccagaatccagaaatctctgggattgaataccggaccggaactttgaaaggttacgaatgtcgcgaatacttattggagaaatggaatcgtcaatgcgcttactgtggtgtcaaggatgttccgctcgaaattgaacatatcgaaccaaagtccaaaggtggttcagaccgtatatccaatctgtgcttggcttgtcacaagtgcaatcaatgcaagggaaataaagatatcaaagactttctaaaaggtaagtcagagctgttgaaccgcgttttgaaacaagccaaaactcccttaaaggatgcggcatcagttaactcaacgggcgtgggcattgttcaatactttgaagtcttttggattgcctgttag

SEQ ID NO: 411 - DNA, 249 bp, Unknown
  Ga0376082_0035695 JGI
cggtaaaacctacccagagttggacatttactgacaactctaccgagcgtgcagactcagctatttcggtagctacgatttttgagtcataacaccaacaaatgaacgccagtttgttgctctgttgattgtcattaagccacggattaacggtttataaatccgcgtgtggcagtccaaacaagctcttaaatcattgtcgaggcaaacattactgagaaatcaggctgacagaatatgtcaaactac

SEQ ID NO: 412 - DNA, 984 bp, Actinoplanes derwentensis
ttgaacacaggtgagtcggcccacggccgggtgcttcctcagcccggtcctctggaatcgcggtcagcagacaacccgtcgggtcgggacgaaacgggatcgcgacgtcccatcgttgtggtggggcaaaccggtgttcaacatgggcgaggggagaccgctgttccggttccggcacagcggcgtcaccccggcacggtggaaaccgtgtcgggagcgggcggtaacgcccagcaacagaggttgaaagagtcgcgggtctttgtactggaccaggccggaaaggcactccagccatgcgctccggctcgcgcccgccagttgttgcgtgctgggcgggcagccgtgcaccgccggacccctttcgtcatccggctgcgcgatcgtggccgcgacgaatcggtcgtgccgggcgtagaggccggagtcgatcccggatcgcggtacaccgggatcagcgtcttcaccagccgatccgacgagaccgggcccgagccggtggtggtccgcaccggtgcctacagcatcggggtccagcatcgaggcggtcagatacgcgacagactcaccgcacgggccgcgctgcgccgaggtcgccggacgcggaatctcaggtaccgggcaccgcggttcgacaaccgccgacgaccggcaggttggctgcctccgtcgttgcggcaccggatcgagacgaccatgtcctggatcaaccggctccggaggtgggctccggtcaccgcggtgcacgtggaacacgtcgcattcgacactcaactgctcgccgatccgcaggtgcaaggtcgcggctatcagcacggtgaacacgcgggccgcgtcgcggtgcgctcatccggcaggttcaacatccgtacggcaatgggactcgtccagggaatccaccaccgccatgtccggctgctgcaacgcggcgacggctggtcctaccgctaccaacaggagcgtttcgaatccccgccggcttga

SEQ ID NO: 413 - DNA, 280 bp, Actinoplanes derwentensis
gtcggggtcgccccggagagcccggtcggtcatagcgtgtgtgaccagcccgagtgagccttggaatgaggtgaactacgttgaacacaggtgagtcggcccacggccgggtgcttcctcagcccggtcctctggaatcgcggtcagcagacaacccgtcgggtcgggacgaaacgggatcgcgacgtcccatcgttgtggtggggcaaaccggtgttcaacatgggcgaggggagaccgctgttccggttccggcacagcggcgtcaccccggcacggt

SEQ ID NO: 414 - DNA, 1194 bp, Unknown
  Ga0310375_1000145 JGI
atggggaaggcggccgtttaccggctgaaacccttcaccataatcctgaagagggaagtgaacaaccccgtgatcgcggagcggaccgaggtgaagttcgacccgggcagcaagattagcggcatagccgtggtcgcccaggggagcgtgatcttcgcgatggaacttcatcaccgggggcagcggataaagggagccctttacaggagggctgctctaagacgcggcagacgcaaccgcaagacccgctaccgggcgccaaggttcaacaaccgcgcacgcccgaagggatggctcccgccgtcccttcagtcgcgggtggacaactgcgtcagctggatgaggaagctcatgaggtttgtcccggtcacggagtgccatgtcgagaccgtgcggttcgacactcagagactcgagaacccggagatatcgggtatcgagtatcagcagggcacgctcatgggctatgagatcaggggatacctgctggagaagtggggaaggaagtgcgcttattgcgatgagaaaggagtcccgctcgaggtggagcacgtagtgcctccgcccaggggatccaaccgggtaagcaacctcactctcgcctgcaggtcctgcaatgagaagaaaggcaataagagcatcgaggaatttctgaaaaggaaacccgataggctccagaggatcaagtcccagctcagaaagcccctgaaggacgttgcggcggtcaacgcgacccgcaacgccatatatggggccctcaagtcgttcggtgtcccaacgtccatgtggagttccggccgcacgaagctgaacagggtgaggcagggatatgagaagtcccactggatagacgctgcctgcgtcggcgagtccggtgcccaggtctccatcgcgggggtgaaacccctcgagataagggccatgggcaggggctgccggcaagtacgcatgacggacaaatacggtttcccgagagggaaggcgggacgcgtgaagcgcgtcttcggcttcagcacaggagaccgcgcacggctagcactgcccaaaggcaagtacgcgggcacatgggaaggggccattgccgggatcagggaaaggggctatcacgacatcaggtgtgggcgcctgaagatcaaggcaaggcactgcaactttaaacttttacaacgggcggatggatatgcctacgcatga

SEQ ID NO: 415 - DNA, 265 bp, Unknown
  Ga0310375_1000145 JGI
accttcgacgtccatgtctcaggtcaaccgggataactcatgcttcggcatgagctcaaccagcatcagccgcaaggctacgttatgggcgaatacataggcacttcggggtgcttctccagccccggaccctgcggccgcggtttaaacagcacggcagccgtgaaaacgggcagtgaccgcggcatacaaaaccgcccgataacatttgcgaggagaccattacccccgcaaggggagaaagtgaaactttattatgcagaga

SEQ ID NO: 416 - DNA, 1251 bp, Unknown
  Ga0265297_10088569 JGI
atgaataatctagctttcgttaaaagcagaactggcaagcccttaatgccatgcagccgagccaaagcaaggcatttgctacaagctggcaaagccaaagtattaaggtgtgagccttacacaattaaacttcttgttgattgtagtgaacagacacaagaggttgtagctggtatggatgttggaagtaagaatattggagtgtgcgtggttagtaagaatgataatgaaattaaggagttgtttaaagaggaagtcattcttaatggtgatggtattaagaagaaaatgactcagagaaagatgtatcgtgttaataggagatatagaaaaactcgttatagacctactagatttttaaatcgagcaagtcaaaatagaattggaagattagcaccaagcattaaacataaagtggattgccatctaaaggaaaagaaaatagtagaatctttattaccagttactaaatggaatattgaaacaacccaatttgatatccataaaatctcaaatcctgaagttgtagattaccaaagtggagatcaaaagggattttataatactaaagaatttatcttatacagagataatcacacatgtcaaatctgtggttgtaaaaataagaaacttcaagttcatcatataattgaacgatcaaaaggtggtactgatgatcctaaaaatcttacaactctttgtgtagaatgccatgataaagttcatagtggagtaattgaaaatttaaaagttagaagaagtattactaaaaatgctgatcatgttaatattataagttcacaaataaaaaagcattttggagattatatttccacctttggatatgaaactaaatataaacgagaattaatgggacttcctaaaacacattataatgatgctttagctatatgtcttaatgatgaagaagctaaatctaataatatcaaattgttaaattattattatgtaaaaaagatggtagctaaaggagattacaagcaaactagaggaagtcgttctgaaattaagatacctacaaagaagttatttggttttagaaaatttgataaagtgaaaacacctaaaggaatagggtttgttaaagctaaacgtgcaagaggctattttcatatctgtgatgtgtttggtaatactgtagtagatggtattaatgctaaaaaaattactagagtgtctgctagaaaaaattatatgatggatactataaaaataacaagaaaggattga

SEQ ID NO: 417 - DNA, 308 bp, Unknown
  Ga0265297_10088569 JGI
atcaaacaccctcccgcaaggggagggttcagaccgtgaggactgaaagtaattgtttgatcagaagacaaacaggaggatgtttaacagaatgtttgtagccgttaaaatgaagaaaaacatacacaccagcgtgtgccgcctcagcacgttgctctgtgactgtatattaaacagagttcaacgactcagtgtatacagtttaaaaactcattttaactcttcgagaggatgccgaattcacacaaacacttccaaattgtgtgatacgcatagactgttactgtacagggaaagtatatgaataa

SEQ ID NO: 418 - DNA, 1254 bp, Unknown
  Ga0209608_1000352 JGI
ttgagagtgttcgtattaaatatgcgtggcaaaccacttatgccatgtaaaccacgaaaagcaagattgttattgaaacaaggtaaagccaaagttgtcaaacgagatccatttactatccaattgacaattgccactggggaagcaaaacaagatatttctcttggtgtggattcaggtagtaaatatattggtatatctgcaactaccaaaaaacatgttttgtttgaagcagaagttgaactcagaaatgatattgtaaaacttttagctgataggagacaatatcgtcgaagtaggcgttatcgcaaaacgcggtatcgtcaagcaaggtttttgaatcgtaaaaaacctgaaggttggttagctccgagtatacaacacaaaataaatagtcatatcaaaataatagatatgctaaccaagttattaccaataaccgatatcacaattgaggttgcaagttttgatatccaaaaaatcaagaacccagatattcaagacaaagaatatcaacaaggtgatcagttaggcttttacaatgtaagagaatatgttctgtggcgggataattaccaatgtcaaggtagaaaaggatgtaaaaacaaaatactgaacgttcaccacatcgagtctcgcaagacaggtggcaattctccaaacaaccttataacactttgtgaaacgtgccataatgattatcatgcaggtaaattaaagttgaacttaaaacgtggccaaatgtttaaagatgcaacatttatgggcgttatgcgatgggcaacttataatgcactcaaagagttatatccaaatgttaaattgacatatggatatataaccaaacacaagagaatcaaatatggtcttgaaaaatctcatagaatggatgctcgatgtattagtggtaatcctttggcgaaaccattagatacctattattatttcaaatgtgttcgcaaacaaaatcgtcagctacacaaagccactccatctaaaggcggtgttcgtaaaaataataaagctccaagatatctacatggttttcaactatttgacaaagtatcttaccaaaatcaagaatgttttatatttggtagacgaactagtggttattttgatttacggaaattagatgggacaaaagttactgcatcagctagtgtcaagaaattgaaattgattgaaagagcaaatacattattatgtgaaaggagggaaggcaattcctcccctgcttacactatcgtttag

SEQ ID NO: 419 - DNA, 240 bp, Unknown
  Ga0209608_1000352 JGI
gtcaaccacccaccacttaaagaagtgggggcttgtaaaagctctagttgactagcctaagtcttaactgactacgttgggatggtcatgataccttagtgtactcctctagcactatgctctatcgtcggtggttaaaagttctaaggggtaggaacggtgctgctgacatgacaagccatttcaacattggcgaagaggcactaacccttttttaaaaaggaggtacgaaccttgaga

SEQ ID NO: 420 - DNA, 1356 bp, Unknown
  Ga0208824_1000448 JGI
atggtattcgtacttaacaaacacaaagaacctttgatgccttgctccgagaagagagcaagaaagttactcgaaaacaaaaaagcagttatacacaaatacactccgtttacgattcgcctaaaaaacgaagttgaggattgtaaggttgagccattacaaataaagattgatcccggaagtaaagaaacaggaatcgctgttattcaagagaaagaagacaaattacttttacgttatgccggaatagtgaagcataaaataacggtcgcggataaccttaaacacaggtcgcaaatgcgccgtggccgcagaaacagaaacacacggtatcgaccagctcgttgggccaatagaaaaaacagcacaaagaaagggcgtttcgcaccctctatgctttcaagagtatactcaactcttaacttagttagaaaaatgaagtcattagcgcctattcaaattgtatcagttgaacacgtgaagttcgatatgcaaaagttagcaaaccccgaagtgtctggcgttgaatatcaacatggaaagttattcgggtatgaagtgaaagaatacttgctcgaaaaatacggtaggaaatgcgcttattgtggtgctgaaaaagttcctcttgaaattgaacacatgattccgaaaagcaaaggcggcacggaccgcattgataatctcgcaatcgcttgcgttaaatgcaatcaagagaagtccaatatgatgccgaaagaatatatagaatacttatcaaaacaaaaaggcgataaagccaaaaccatgatcgcaaatttcgaaaaggcgataaaggacgcaaaacagacccttaaagatgctgcaagcgtaaacacaacccgatgggttttatgcaacaagctcaaagaggaatttggagacgttgagctcgcttctggcgggagaacgaaattcaacaggcacaatcaagggttgccaaaagaacattattttgatgctgcttgtgttggtttgtgcgataagcacattgatgttaaaacacaatacgcaacaataaacaagataatgggccgtggaaacagacaaacgattataccggacaaacatggctttgcaagaggtcatcgcagtcgcaacaagaccaaagaaggattcatgactggcgattttgtaaaagtcaaaggcataaccggacgcgcaatcgcggtgaaaagcgccggaacagttcatatcagggataaaaatgggaaggaaataagttgtagcactaaaaaggcactaatgcttcaacacggcgatggttggcagcgttctattttgaaaataaactttaacagaaaatcagaaaaaatacaaacagaagaaaaacaaatttga

SEQ ID NO: 421 - DNA, 301 bp, Unknown
  Ga0208824_1000448 JGI
atcacggattaattttaccttatgtgtagcggtttgtaacttatctatttacaaagcgggtccagactaaggtcttagagacctacgttattttgctcatgacaccagcaggtgcttctccagccggctgctctgtcgaaccagtctaaacatgcgattgtaaacacggaaggtacgcaagtgattggctcgtaaaaaggcattataacattgtcgaggagagacgaggcatatgcctcgcgttacaaggcgcgtaagcgcaagccttcgggctgtaaataaaaggagtgatacctgtatg

SEQ ID NO: 422 - DNA, 1260 bp, Unknown
  Ga0223845_10169920 JGI
atggtatatgtattaaacaagaatggtgaacccttgatgccaactaagcgtcacggaaaggtgcggcgtatgctgcgcgatggcaaagcacacgtggcaaggagctttccattcaccatccaacttgactattccaccagtggctatctacagcccgtgtcgcttggtgttgacgcagggacacagcacatcggcatgtcggcaagcacggatacaaaagaacttttcagtgcagaagtggagttgcgcagtgatgtgaagaagaaaatatcagagcgaaggatgtaccgccgtaatcgtcgctataggaagacgcgctaccgcaagccccgctggcagcatcgtggacgcactgaaaattggctcacaccaaccgtgaaaaacaagattgaaagacacttgcacgttatcggtatggcacattccgtccttcccataacgaagacggtcattgaaactgcccagtttgacatagcaaaaataaagaacccaaacattagcggtgttgaatatcagaacggcccgaagaaagattacggcggcgtacgcgagtatgttttgtggcgtgacggacacaagtgctgtcattgcaagggaaactcgggtgacaaaattctcgaagtgcatcacattgagacccgtcagactggcagtaatgctccagataaccttgtcacgctgtgcaagacttgccacaaggcataccatgaccacaaaatacatttggacgtgaagagcggcatcggcatccccttccgcgatccttcacagatgaacattatgcgtaaggctttactgaacaaagctagaacgatgtttcctaatgtccataacacctatggctacatcactaaagacacacgcatcagtaatggcatagagaaaacacactgcgccgacgctttctgcatagctggtaacttgaaagccgagagactagatacattcttgctctgccactgtctaccaagacacacaaggtcattgcatgtagctaactttaggaagggaggcgtaagacgccctaccgtcgctcctcactggttaaatgaaaatctacgactacagagatacgacacggtggaatggaacggcatccgctgtttcatttccggaagtaccaatggaaggcctgttctaagagacataaactggaagcttgtaacaccaactacttccgtaaacgcaaagactgttaggttcctatgccgcctacacggaagactattatcatcacaacaaccgcaaggtgcaatataa

SEQ ID NO: 423 - DNA, 282 bp, Unknown
  Ga0223845_10169920 JGI
gtttactcacaaaaatgctgtcattaacagtcgatagtgagtaagccgattagcctcagtcatttaaacatcatatcgagaatgtgaatattaaatgaactacgttagaagtgaatgtataggcaccttgaaatagtcgcccaagtttcaagctctgcggtcagtgattaaaaggagcgaaagcaacagtgttgctgacaagaaaccatttcataacattggcgatgggcgcataacgggcattagcccgacttacagtattttaaaattttagagtagatg

SEQ ID NO: 424 - DNA, 1230 bp, Sediment metagenome
atgccaatccgaaacaaacaggttaaacgggagactagagtggtcaagatcagcagaaaagctggtcgtttaaagacaactgaactgtctgcttgtggcaaggcaaaggatgttggaaatgcctccctagtttccaacctctccgacagtcagcctcgaagggaaagcacattgagggattctgaaaagaaccccttggtgaccgggaaggtaacttcccctgttctatggatcccggttgtttctaagaccgggaaacccctgatgcccactcgtccaaagagggcgagagagttgatgaagaaaggaaaggcgatcccgaagtggaaaactggtatcttctatcttcaactaaccgaaaggaaagacggagatgttcagaaagtggtagttggaattgatccgggcagcaaaagagaagcattcacgatcaagagtaacaagcacacttatttgaacatattaagtgatgcggttacttgggtgaaagaggcagttgaggcgaggggacaagccagaagaggtaggaggtacagaaaaactccttgtcgaaaaaacagagaaaatcgcctaagaggaagtttggctccatcaaccaaggcaagatggcaggcaaaactgagaattgtcaacattctgaaaaaattatttccggtgaccagttttattgttgaggacattaaggcaacaactaatcacggtaaacgatggaacaaatcgttttcacctcttgaggttggcaagcaatggttttattctgagctaaaagaatttggtaatcttgaggttaagcgaggatatgaaaccaaagaattcagggatgttttgggtttgataaagacgcaaagtaaaatggaagaaaaattttctgctcacaacattgactcgtgggttttagcaaattcagtggtcggtggtcacactcaaccagacaatacttcaattttccgtttgattcctttaagattccatcgtcgccagcttcacgcctttcagccagacaaaggaaatttcaggcgatcttacggcggaacactctctcaagggctaaaaagaggttcattgattaagcataaaaaatgggggttgtgctatttaggtggatattctgaaaaaacaggattaagcttgcataagctgggggacggcaagagattgtgccagaccgccaaggaaaaagacttaataattttaaggtttaataattggcgatggtacaagagaacataa

SEQ ID NO: 425 - DNA, 415 bp, Sediment metagenome
gtagtttcatttccttatccagttgaaggcactgtggttcgcccaccgggtcagggctgcctttcctgtgtgcataaaacctactgttcggcgatttactggttgcgccgtgatgacagccgttttgacgatcatacgggtcgggcttgtgcttcttggtcaaacaaccccgccgatattgttaccaccgtgacagaggatgacattgagcaaaataattacgagattgatacggggattgttgatggttgggaagataatcagttttttgaccagaaccagaaattttagcaatacaaacgggaatccctaatgcctagagatattgttaaccaccccatagagtaaaatctaatggggcttgtaaggagtaggaatgccaatccgaaacaaacaggttaaacgggagactaga

SEQ ID NO: 426 - DNA, 1599 bp, Unknown
  Ga0310139_000809 JGI
atgccactcccagtcccggacgatgaagtgccgtatctgccgagggagaccaaccggcaaaagccgtgtttttaccttttttttttgaaaggtggtggattacgaatggtatatgtaatatccagggaaggcaggccattaatgccgacaaagagatatgcaaaagtcagggttctgctgaagcaaaagagagcgaaagtagtaatgtcaaagccatttacgatacagctgttgtatgaaaccacagcatatacgcagccgatagtggcgggatatgatcctggcagaactcaccaatcgataacggctgttaaagaagaaacgggtgaagtgcagatatcatcagagttaataagcaggaataaagaggtaccgaaactgatggcgaaaaggaagatgcacagaatgataaggcgtcgcaatcgtcggatgaggaaaataaggcatgcgaaaaggtgtggcgccacattcgaagtaacgaaatatatatatcagcccggtgcagacaagccaattccagtcaaatatataaagtgcaaagaagcgaggttctgcaataggaaacggccggagggctggcttacgccaacggcaaaccatctgcttcagacgcatatcaattatctaaagaagatccggaaaatactgccgataaccagggtggtactcgagtatgcgaagtttgacatacaaaaacttgaaaatcccgatattaaaggtgagggatatcaggggggcaggttatatggatatgccaatacaagggaatatatagaagaaaggcaaaaccacaaatgtttgttatgcggtaaaaatccgatagaacatttacaccacataaagccaaggcatgaaagcggaagtgacagttgcaggaataaagctggtttttgcaataaatgtcatataaaagtgcacaaaaatgaaaaagtcagggaaaagcttgccgagaaattggaaggcttaagcaagcaatatgattcaacaaacattttaaactcaattatgccgtatttgtataaggagatacagaaaataatgggtgcaaagaatgtgcaaatatgctatggatacgaaacgaaaataatgagaaagagtctgggtctgggaaagactcattacaacgacagttatgcaatggcattaatggcggcaaaacaaacaagcaagattcaagatataaccccgtatatgttcaaacaatacagaaggcataaccgtcaattctgtgatgcggaaagggacaggctgtataagaaaggcagggagatagcagccaggaacagaaagaagaaaatggagcagaaaaatccatcgctggaagattatcgggaagaactaattacaagcataggcaaaaaagaagcagcgagggtaatatccgggctaacggtgtataaagcgataaagagaataagaacgtctatcaaggaaataccgatgccgcaaggcagcatagtgatgtacaaaggtaagcgaatggtagtgatgggcgtattaaacaaaggtaatttattggtgttggaaaaccatgaaggttatgtaccggtaaaggaatgcaaattactggcaagaaacagcggtatagtatgtctgtag

SEQ ID NO: 427 - DNA, 226 bp, Unknown
  Ga0310139_000809 JGI
gtcaactactccttaatgaattaaggagcttgcagctttgtagctgtcggttgtatctataggggaacctgctggtacagtagttgaacaggcggttgtacggcagcgcactccgaggatgccactcccagtcccggacgatgaagtgccgtatctgccgagggagaccaaccggcaaaagccgtgtttttaccttttttttttgaaaggtggtggattacgaatg

SEQ ID NO: 428 - DNA, 750 bp, Activated sludge metagenome
atgcaacatgtttttgtgctagaccagaacaaaaaaccacttgacccttgccatcccgcacgggcaagaaagcttttgcgttctggtcaagcggcggtgttccgtaggtttccatttacgattattctcatggagcgaacactgaaagaatctgtgacgcacaagtactgtgtcaagattgaccccggaagcaagcaaacgggaatggccttagttcgagaaggtgaccacaaggtcgtttgggcggcgataattcaacatcgtggacaggtcattcgagacaacctgcttgcacgtagagctatcagacgcgggaggagggcacatcattgtcgctaccgtcctgcacgatttgataatcgtcatcgccaaaaaggttggttgccgccaagtctggaaagtcgtttggcgaacatcgagacttgggtgcgaaggctggcgttgcacacgccattgactgccatttcaatggaactggtcaaattcgatactcagaagatagaaaatcctgaaatatcaggggttgagtatcagcaaggcaagcttgttggctacgaagtccgtgaatatctactcgaaaaatggggacgaaagtgtgcctactgcgggaaaactggcgttccgcttgaaatcgaacacatcattccaaagtcgcggggtgggtcaaaccaagtttcaaacctaacactggcgtgtgagacatgcaaccgcgccaaaaacaacctatccgccgtagaattcggccatccg

SEQ ID NO: 429 - DNA, 286 bp, Activated sludge metagenome
gtcaacgactgctaggctaaagacctagcggcttgggaaaatccaagcccatgttgaccagccacagccaccagcggtaacgctgacggggctacgttgtcaggagagtcaaagaacacacgttggggtgcgtgccagcctcaaccactgcaactggatgattaaaagaacaagggtcttgttcggtgtcatctggaagtgctgactgataacattggcgaggcaaactttacccccgataggggagtacaacccgtaagggaaaggacataagaaaatgcaacat

SEQ ID NO: 430 - DNA, 1287 bp, Unknown
  Ga0373625_0000621 JGI
atgaaaatgcagcagttacaattaaagttaaacaacatacctacaaatgcttcactagtttgtagctctataagttttgatttaaacaaagatgtaagtcttagtgatcaagacaaagtactggattgtaacaatctcgaagtgaatcaacgcttacatacaagcggtcttaaagacattgtgtatgtattaaatgtaaatgcgcaaccattaatgccgtgtagttgtgcaaaagctagaaaattattaaaaaaaaggagagctaatgtcgttaaaaattatccttttacaattagattaacttttaattgtgaaaatgtggttcaagatgtcatgttaggcatagatagtggatttaagtatattggttattcagcaattactaaaacaaaagaattaatttctggaacattgacattagattgtcaaacgattagtagattagcaaatcgcagaatgtatcgaagaaatagaagagatagattgtggtatagaaagtctagatttaataatagaaaatctagtaaaaaaggttggttgtcgccgtcaattaaaagaaagtataatactcatgttaatttgattaataaattaaaaaaactcttacctattaaagaagttattatagaagttgcaaaatttaacagtaatattaagtcgtcaaaattaattgataatagtaaatgtcaattgtgccataaaaattttagtaatactaatcacgttaatgaacatcacattattactagactgtatggaactaatagaaaagctaatatagcttatgtacatgaatcttgtcacaaaaaaattcataaaaacaaaatgttagatatgttcgagaaagataaaatttatagacagtctgcttttatgaacattattagtaaaagatttttagaagatggttataagactatttttggatttgacacttttaataaaagacaagtttataatttagaaaagactcatactgatgatgcctttattatagcaggaggagataatcaagaaagagcaattaataaaaatgtagttcaaaaacatagaaataatagaatattacagttaaatagaaaaggttttaaacgttcaatacgacgtcaaaggttcaaaatacaacccaaagatttgatatggataaacaacaagaaatatatttcaaaagggtgctttggaaaacgcaaacgggtgacatataatgatgaaaatggtaaaagttgtcaacaatacatagatagaattgacaaatattataattttggaagtttaatttttctatga

SEQ ID NO: 431 - DNA, 361 bp, Unknown
  Ga0373625_0000621 JGI
gtcgactgctaatttttagtttaaatggtgacatttaatgaaaaagtcgattagagagcatgaaaatgcagcagttacaattaaagttaaacaacatacctacaaatgcttcactagtttgtagctctataagttttgatttaaacaaagatgtaagtcttagtgatcaagacaaagtactggattgtaacaatctcgaagtgaatcaacgcttacatacaagcggtcttaaagacattgtgtatgtattaaatgtaaatgcgcaaccattaatgccgtgtagttgtgcaaaagctagaaaattattaaaaaaaaggagagctaatgtcgttaaaaattatccttttacaattagattaac

SEQ ID NO: 432 - DNA, 1281 bp, Unknown
  Ga0307928_10005039 JGI
atggtagtgtatgtaataaataaatatggaagacctttaatgccatgtagtcctgctaaagcgagacatctattaagagatgggaaagctaaggttaaaaaacgtacaccttttactatccaacttaaatatggaagttcaggttacactcaagatttaaatttaggtattgatcctggatctaagaaagttggaacagcagttcgcagaagtggaacaaaagaaattttttactcttctgaaattactttaagaacagatataacaaaaaagttgaaacagagatcttcttatagaaaaactcgtagaaatagaaagacaagatatagaccaccaagattcttaaacagaacaagaagtgaaggttggttacctccttcagttcaaagtaaaattaattctactaagaaagagatagattatattttaagtattcttcctataactagaatatcttttgagtattctaaatttgatatccatagactcacaaataaatttgtgagaggtttctggtatcaattaggagatatgtatggttatgaatctaccaaagcttatgtcttagaaagagataattataaatgtcaatcatgtaaaggaaaatctaaagataaaaagttagaagtacatcatataatctatagaagaaatggtggaactaacaaaccttctaatctacttaccttgtgttctacttgtcatgatcttgtacataaagatcaacttattttaactaaatatcaattaaaagcttgtgttaatacaatagatgccactcaagtatctataattagtaagaggatttgggagtatcttttatctcttaaaccagattatattttagctaagacatatggatatagtaccaaagttaaaagaaggttacttaaaattaagaaatctcatactttggacgcagtagctatctcttatggtaggaataagaagtacagaaaaggacttaggaaaccaagaataatagataacttttataacaagatttgcacttctaaaggagactaccaacagactaaaggtagacattcagaaaagcaaattccaacagataaaatacaagggttcaggaaatttgatcttgttaagtaccttggtaagatttatagtattaaaggaagaagatccacaggatatgtagaattaatggatcaaacagttaagaatctgaatttaagaccaatacctaagtttgataatttaaccaggttacaagctagaaattcatggattatatttccaaatacaattcaaaatatttga

SEQ ID NO: 433 - DNA, 311 bp, Unknown
  Ga0307928_10005039 JGI
gtaaactacctacgaactaaagtttgtaggcttcaaggtgacttgaggatagctaatagtttaccagactcagaactaagaaattagttctccgttatttaagttatcagaccaaagaatgccgcctcagttctttgctctctggaggcactgtaaacagagattaatatgtctcggtcaacctcagtacgacctacgaagtaggtaagcttagataacattgtcgagaggaagttggaaaagtttagtggtaacagctaaatttagtacacacaacttttaacttaggttaggaggtacactcaatggta

SEQ ID NO: 434 - DNA, 1365 bp, Unknown
  Ga0315291_10038423 JGI
atgcagaagttacaagcaaagttcaagaacacaccaaaggatgcttctctagtcccttgctctgtaaattcttcattaaacaaagaggaaactcttagtgtgaaggataaaatactgacttgtaacaatcccgaagagaatctacaccaacatagaggtggttcgagcttgcgagtttcgaatattgtctatgtacttaacatgagaggacaacctctcatgccaactactccacgaaaagcaaggatattactacaaagcaaaaaagcaaaagtcgttaaaagaatacctttcaccattcaattaacatatcaaacaggtgaatctaaacaattaatagatctttgtgttgattctgggtacaaacacattggtctatcagctaaaacaagtaaaaatgaagttttctcagcagatattaaactcagagataatatcaaacaattacttgcagaaagaagtatgtacagaagaaacaaaagaaacagattgtggtatagaaaatcgagattcaataatagaggtaaagaaggatggtttccaccgtctataatgaacaaaattaattctcatattaatattattgacaagatatgttttcttttgccaatcacaaacattatagtagagacagcttcttttgatatacaaaagattaaaaatccagatattcaagggaaagaatatcaagaaggtccacagaaagactttgataatgtaaaagcatatgttttgtacagagacgaatatcaatgtcaatattgtaaaaaatcagatataaaacttcatgtacaccatattgaatcaagacaaaccggaacaaataatccggataatttgattactttatgcgagaaacatcatagagatcttcacgatggtaaaattaaattaaatgttaaaaagccaaaagattttagaaaccagacatttatgtctatagcaagaaataaaatgatggaaatgttaagaaaaagatataataatgtacaagagacctttggatatataacaaaagccaatagattatcattaggtttggagaaatcacatataaatgatgctttctccataggtaatggaaacatacagacgagatgtttctcaaatattattgttcaaaagagaagaaataatagatgtttacagataaatagaaatgggtttaagccgtctataagaagaaagaaatctaagttacaacccggagatttggtaaaagttaagaatattttgtataatgtggtgggtatgtttaacaagggaacatatgtaagagtgaagaacaatatgaataagatattgaattttaatattaagaagattaattgggaatatagttttggaggatttgtttggaattaa

SEQ ID NO: 435 - DNA, 269 bp, Unknown
  Ga0315291_10038423 JGI
gtcaactaccctcacctaaaggtgggggcttgtgaagtgatttacatggtaacagttgattagggagcttaattcaaaagattatgcagaagttacaagcaaagttcaagaacacaccaaaggatgcttctctagtcccttgctctgtaaattcttcattaaacaaagaggaaactcttagtgtgaaggataaaatactgacttgtaacaatcccgaagagaatctacaccaacatagaggtggttcgagcttgcgagtttcgaatatt

SEQ ID NO: 436 - DNA, 1266 bp, Unknown
  GENOME_ACESSION: mgm4743564.3 MG-RAST
  MISC_FEATURE (1129)..(1176): Any "n" represents any nucleotide
atgccagagagtctaaccgctagtgctccgttaattcagttatcacaccccggggtgttatacctggctccgcggctctgtgcaggctctgtaaacagtcctgagagggtaagggacagtcaacctggtccgtgcgcttggcgcacaagctgttttaacattggcgaaggtatccaactggccggaacattcagtacacaaggaacaatgcgaagggtaagtattaccggatttggttccggagaaaggcaactgatggtttatgtattaagtgcagcgggacagccgctgatgccgacaagacggtatggcaaggtccggcatctcttacgggaaggacgggctgttgtcgtaagacggtgcccgtctacgatccggctgatgtatgacacgcctgaaagaacacagtcggtctctctcggtattgatgcaggatccatacatattggattgtctgcatgcgagaagaagcacgaattattatcagcagaagcagaactgcgcaccgacatttccaacaacatcacacagcgcaggacactgcgccattcacgcaggaacaggaagacgagataccgcaagccgagattccagaaccgtgtccacgcaaagaataaaggatggctcgcaccttccgtacaggcaaagtgcgacgcacatgtggataccgtgaaaaaggcgattgatatccttccggtatcagagatcacgattgagatggcacctttcgatacacagatgctgaaagccgagatggcaggccagccgcttccatccggtgaaaactaccagcacggagaatcagaaggttatgacaacatcaaggcttacgtgaaatggcgcgacggttatgaatgccgcatctgcggggccgagcatgtacacttacaggtacaccaccgcgatcagcgtcatgatggcggaagcaacatgccggcaaacctgatcaccgtctgcccggactgccacaaagcgtatcatgaaggcaggctgcatgggaaaaacgcggaactgatggaacccggaccggaagtaaagccaatgcgtgatgccgtattcatggggatcatgcgctgggcggtatggaacaggctgaaacagttcggccttccgctacatatgaccttcnnnnnnnnnnnnnnnnnnnnnnnnnnnnnnnnnnnnnnnnnnnnnnnnagtacgggcttgaaaagtcacatcgtaacgacgccagatgcattgcaggatatggcggggcagaacctgatcctgagtggtattacgtga

SEQ ID NO: 437 - DNA, 271 bp, Unknown
  GENOME_ACESSION: mgm4743564.3 MG-RAST
gtcaataacccgcggtcaaaaccgcaggcttgaaaaagcttattgactagcctaagcgcagcgacggcctcatgccagagagtctaaccgctagtgctccgttaattcagttatcacaccccggggtgttatacctggctccgcggctctgtgcaggctctgtaaacagtcctgagagggtaagggacagtcaacctggtccgtgcgcttggcgcacaagctgttttaacattggcgaaggtatccaactggccggaacattcagtacaca

SEQ ID NO: 438 - DNA, 3735 bp, Human gut metagenome
atgagagtatttgtattcaatatgcgtggcagaccattaatgccatgctcacaaagaaaagccagattactcctaagggaaaataaggctatgatttataaatatcatccatttacgattcagttgacttatacaactggagaaacaaagcaggactgtcatataggtatagacacaggttctaaatatataggagctgctgtcagatcagaggataaggttttttggaaaggcgaaatcgagcttcgacaggatatcaggtcaaatcttgatacgaaacgtatttatcgtagaagcagacgaaatcgtaaaacaagataccgaaaaccaaggtttttaaatcgtaagagaagagatgaatggcttccacctagcttgcaaagcaggataaatcatacgtttcattggattgacacattgagtagtttggttccaaaccccattcttcacatagaagtcggtaagtttgatgtagcaaagatgataaatcctgaaatccatggagttgactatcaacatggtcagacatatggtttcttcgatgaaaggtattttgtttttgcaagagataactacacttgtcagtgctgtggaaagtcaaaaaataagattttgaacacacatcatatcatctaccgcagtaatggcggaacaaacagagttgataatcttattacagtttgcacagattgtcatacatcgcagaatcacaggaaaggtggaatattctatcaatggcaggagcagcataaaaaggtaaaacaatacaaagaaccgccgttcatgaataccttacgtaagaggatatttgtagcgtatccagatgctgagatcacatatggatctgaaacaacaccaaaacgtaaggcgatgaaattggataagacgcactataatgatgcgattgtcattagtggtatcaatgaaatcaaagaaaatcctgaagaatggttactgataaaacaattccgcaaaaagaaacgctctttacacgaggctaccgcccgtaagggaagaaaaaagccaaacagaaatcagacgcgtaacagtaagaatacgccttattataaaggattttatcttaacgataaggtttcagtttttggaagaccaatgattgagtactacagaagcggaacaggttcaggaggagctgtaaacgttgaatacacaacaaatattttggacggatttgaaaacagcaaccttaactttaacaagactatagttgaagactataaggaatggttaaaagaccatccatttgataacggtggcggtggctgggcatgcgagccatggttccagaaagatatggaaatcacagcagattatgcaaagaaacaggcagaatcaactaacaaggctgtatacattatcggacgtacagcaggagaagataaggacaacgccaactgggtaggaagctatcttcttacagatgaagaaaaagaaaaccttaagaatataacagaagctttcgaggatgtttgtgtagttcttaacgtttcaaatattatcgaccttaagtggattgatgaagaacagtttaaaggacacatcaaatcagtaattattgtatggcaaggcggtatggaaggtggaaacgcagtagctgaagcactttcaggcaaggctacaccaagcggtaaattacctgacacagtagcttatgatattgaagactatcctgctaatgacaactttggcaacgaacttacaaatctttacaaagaagacatttatgtaggatatcgttattttgaaacatttgcacctgaaaaagttcaatttgaatttggtttcggactttcatatacaacatttgatatcgaaacagtatcagccgatgcagatgatgaaaaaatcacattagaagttaaggtaactaacacaggcgacaagttctcaggaaaagaagttgttcaggtatattacgaagcaccacagggaactttgggacagcctgcaagacagctttgtgcatacgagaaaacagaaaatcttgcaccgggtcagagccagacattaaagattgctttcgatattaacggaattgcatcatatgatgactcaggcgttacaggcaacaagtcatgctacgtattagaagcaggagattacaacttctacgtaggtaacagcgtaaaaaataataaactagcttatacatataaaattgaagaacttaaagtaacagaacagctttcagaagctgcttgtcctaacgatgaaaatcttacattaatgaagccgggcgagagaagagaagacggaacatacgaaattacatatgtaccatcacagaagcctacagttgatatggctaagagaatagaagacaatcttccaaaagacatgaaaattacaggcgatgtaggaattacattacaggatgtaaaagcaggtaaaaacactattgaagagttcgttgcacagcttacagttgcagaattggcacagattgtaagaggtgaaggaatgagtaaccctagagttacaacaggaacagcttcagcttttggtggattaagcgatacattgtttgcttacggaatccctgcagcatgttgtgctgacggccctagtggacttagaatggaaggaaaagctacacagcttcctattggaacagcactttcagcatcatggaatcctaaacttgtaagagaactttacacaatggaaggtcaggaattatacggaaatcaggtagatacattacttggacccggagtaaacattcacagacatcctttaaatggacgtaactttgaatactattcagaagatccatacctttcaggaacaatgtcagttgcatcaacaggcggtattaaagacggtggtgcttggggaacaattaagcatttcgcattaaatggtcaggaatcacatagatttaagattgacgcagtttgctcagaaagagcaatcagacagatttatctcaaatcatttgaaatggcagtaaaagccggcacagttaaaacattaatgacagcttacaatcctattaacggacactgggcagcttcaaactacgacctttgtacaacaatccttagaaatgaatggggatacgagggtatcgtaatgactgactggtgggccaagatgaatgacgttgtagaaggtggcgaagaatcaaatcaggatacaagagatatggttcgctcacagaacgacgtatatatggttgtaaacaataacggcgcagaagttaactcaaacaacgacaacacagaggaatcaattaaagagggaagacttacaatcggagaacttcagcgagctgcaatcaacatctgcaacttcattctttcagcacctgttattgaaagagaattagttgacacagacgttgcaaaacattacgattcagttccaaatgatcaggccaagtatgaagtatttaacattgaaaaagataataaggtaatgttcaatagcggagcagaagcaacattagaagttgaagacgaaggggaatacacaattattgttaacatctcatttgacaagtccaacttatcacagtcaacagtaaacgttaatgccaacggcacaacaatggtagtaatccagactaacggaacagacggcaactggattacacagaagctttgcaaggttaaacttgacaagggtgtatacaacttaaaacttgaagaagtattagcaggaatcaaagttaaatatattcagtttaagaagattcctaagaaaaaataa

SEQ ID NO: 439 - DNA, 286 bp, Human gut metagenome
gtcaataaccccgacctacagtaataactgttgaggtcggagcttgtaaaagctcatattgactagcctaagttcttcgagaactacgttgtttatgttatcacacctgcgaatgataccatagtttgcagccttgtgtaggctctgtaaaagttctgtgaggtaggaacggtcaacctagtatgttcgatcacgacaagcatttacaacattggcgaagggtaacaaactttcaaaagaaagggacagcacttgagagtagctgtcaaaggtaaaaactatgaga

SEQ ID NO: 440 - DNA, 1140 bp, Unknown
  Ga0172382_10042448  JGI
atgttagtttatgtcatcaacaaaaacggcaatccgttaatgccgtgtaagccgtcgaaagctcgtaaacttttacgcgacaagaaagcgaagattgtgaactatgcaccattcacaattcagcttcaatgggactgtaaggaatatgttcaaaaagtgtctgtaggaatagatagaggttcgtcttacacgggttactgtgctatttctaaagacaaagtattgatttcaggacgaattgaccacagattagatattaaagacaagatgactgctcggctcggtaatagaaaaagtagacgaagccgtatgtggtatcgtaagccacgttttctcaatcgagcatctagcagacgagcagggcgcttaccaccatcaattaaagcaagtgtagaagaagtgtttcgtgtaatacgaaaattaccaattcctatttttgaaattacttgtgaagatgtgctgattgatatcacgaaattaaatgatccaagtctaaaaggtagtgcgtatcagaagtcgaataagctcaacgagaacttgcgtctagcttgtttactgcgtgataatttcacatgttatttatgtgggaacaaacgcaagcatgaaaagctagaagcgcatcacatcgtgcccgtttcacagaatggtaagaatagtatttataatttagtaacgttatgtaataagtgccatgatgatgttcatagcgagaagttgaagttagatttaaaaggtatgggtggtattcaagatgtagtagcacaacgaactatgattggtaagacatatttgtataatttgttgaaaaaatatataacaccaaatttatatttactatttggttatgaaacgtcacattatcggaaggaattaggtctagtgaaagatcatgacacagatgctttttgtatagcaaatcaccacgcacgttacgatttaacatatgaacgtgataatgtatataatgtgactttcagagctaaacagacgagacgtagatatcatgataagcctcagaaaggtaagggtcgagttgaatatcaagtgaatgaaagtctagaaggtttccggaaaggtgatttggtgttagtaaatagttgtgtgaaacagattaattcgatatattctgatgggcgttta

SEQ ID NO: 441 - DNA, 249 bp, Unknown
  Ga0172382_10042448  JGI
gatatggtctttttagacatagttccttagctagtagtatttcatagtatggaactaacaggaggctggctgttgctagcagaagttattaggtgaacagtttacttaccctggggtgttcgctccagctccaggctctaagggacaggtttaagggtagcggaaacgtgaaggtgatctgtctgaggaaaccctaataacaactccaaggagcaaagaactctgtcaaaggagaatataactatgtta

SEQ ID NO: 442 - DNA, 1995 bp, Human gut metagenome
atgccctgttcaccggcaaaagcgcgccttctgcttaaagagaagaaagctattgtgaagaggcgaacgcctttcactattcagctgacgattgcaacgggtgagtccaaacagccggtgactctgggtgttgatgccgggtacaaacatgtcggcctttccgcatcaacggaaaaggctgagctttatgcatcagaagtcgaactccgtcaggacgtctctgatctgctctctgctcgtcgtgcgttacggcagtcccgccgtagccgcaacacgcgctatcgtgcaccgaggttcgacaaccgcatccgcaccaaacgcaaaggctggcttgcaccgtcggttgaaaaccgaatcaacgcgcacttgtcgcgcatagaagcggttcttcgactgctgccggtcacaaagatcaccgtggaaacggcgtctttcgacttgcagctgctgaagaatcccgacatttcagggaaagaataccaggagggagaacagctcggcttctggaacatccgcgagtatgttctttgcagagacgggcatgtttgccagcattgttacggcagatcgaaagacccggtgcttaatgttcatcatctggaaagcagacgtacgggcggagattcacccggcaacctgattacgctttgtgagacgtgccataaggcccttcatcgcggtgaaatcacgctgaaggcaaagcgcggacaatcgttccgcgcggaagccttcatgggaattatgcgctcggaggtgctgaatcgcctgaaggcgtcgcatcctgagctggaagtgaacaacacctacggttatcggactaagcacgcacggatcgcgaacgacatcgctaagtcgcattgtgcagatgctttctgcatcgccggcaacctcggcgccgaaaggctcggcgaattcttcttccagaagcagacgcgtcggaacaaccggcagattcacaagctctccatcctcaaaggcggcattcgaaagcgcaatcaggctccctttgaggtcaaaggcttccgtctttttgacaaagttgcctgccagggagaagaaggcttcattttcgggcgtcgatcaaccgggtactttgatgttcgaaagcttgacggaacctgcatttcggcaggcatcagctacaagaagctgcatctgctggaaaagagacgaacctatttaacagaaattcgaaaggaggaggcgcttccccccccctgcctgaaggcaggggctccgcgcctaaatgtgatgaataacatcgactttcacggcatcgaggagatttggtcctcgctttccacttcttcccttctgtggctgacggtcacgctggccgcttacctctttgctcagaaactctataaatggagtaattggaattcgctcttaaatcccgttgcggtttccattgtcacggtcgtccttttgctgatggccacgcatacgccctatcagacttacttttccggcgcccagttcattcattttctgctgggaccgacaaccgttgctttggccgttcctctgtacgacctccgaattcagcttgctaaaaattggctgccgattctgctgggactttttgccggcgccgttacagcaattacttcgaccgtcttgattgcaggactcctcggcgcatctccggaaaccatcatcagcctggcgccgaagagcgtgacgaccccgattgctatgtccatcgcagaaaaactcggcggtctcccggccctctctgcttccctagtggtactgacaggtgtcctcggttcaatttgcgagggccccctcttcctgcttttgaaagtcgactcttcatcagctaaaggttttgcgctgggactttccgcgcacggcatgggcacttcccgtgccttccagattgattcaacagccggcgcctatggcagtttggctatcggcttaaccggtttaaccactgccctgttggcgccgctgctcacaccgcttttaatgaagcttttcttctaa

SEQ ID NO: 443 - DNA, 247 bp, Human gut metagenome
gtcaactacctcggcctaaaggccgcgacttgaaaaagcctctagttgactagcctcaggccgtcatttggcggactacgttggtcgggattttataggcaccgcgggatgcagatcctagtcccgcgctctgcggccgatggttaaaagctctgagaggtaggagcggtgctgtcggcttgaaaccccttccaacattggcgaaggatcacaaccggtcgaaagaccgaggagataaaacttgaga

SEQ ID NO: 444 - DNA, 1107 bp, Unknown
  EM338_1079660 JGI
  MISC_FEATURE (994)..(1062): Any "n" represents any nucleotide
atggtgtacgtacaagacataaatggtaaacctatgatgccaacaacgaggcatggtaaggttaggagactgcttaaagacaaaaaggcagtcgttgtgaacctatgtccgtttaccatccgattaacgtacgttacatctgattacaaacaggaaattgtgttaggcgttgatgctggtactaaacatgttggtttatcagctacgacgaaaagcaaagaactttacagtagtgaagttatccttagaaatgatatcgtagatcttttgtctaccagaagagagctacggaaaacaagacggaataggttaagatatagaaaacctcgttttaataatagaataaaaagcaagcgttcaggatggatagcaccttcggtgaagtacaaaatagacgcccatattcgtgttattgacaatgtatgttctatattaccaatatctcgtattgttattgaagtagctcaatttgatactcaaaagattaagaatcctgaaatattaggtaaagaataccaggaaggtgatcaacttgagttttggaacacaagggagtatgttttagcaagggatgggcataaatgtcagtattgtaaagggaagtcaaaagataagatccttaaagtccatcatcttgaatcccgaaaaacgggaggtgattccccttctaatcttattaccttatgtgaaacttgtcacaaagaataccataaaggtaatatagatttgaagatcaaacggggatcgtcgctccgcgacgcggccgtaatggggatcatgaaatggaagttgtatgaagaactgagatccagatacgacagagtttctatgacgtttggttacattacgaaacataatcggattaaatacggtattgaaaaatcccatacatccgacgcgtttgtcatttctatgaacattaatgcgaaacgaatcgaacgtcaatatttaaaacgtttaattcgtagacataataggcaaatacataaaatgnnnnnnnnnnnnnnnnnnnnnnnnnnnnnnnnnnnnnnnnnnnnnnnnnnnnnnnnnnnnnnnnnnnnnaattttaaaaggaggaaagaagaaaaacaatcaagctccttttga

SEQ ID NO: 445 - DNA, 271 bp, Unknown
  EM338_1079660 JGI
atataatttcattataaggttttaatgtaccataaatggtccggatattagcctaagccttgaaacgaaggctacgttatttgagaatatatagttacctacggatgtttgcccaagtctgtagctctaaggatggtgattaaacaggagtagtgtatttggcgaaacagtgttgccattatataaaacctcttataacattggcgatgggtactaacagagttttactctgacttatgttgaataaacattaaaaacgtttgtagatatg

SEQ ID NO: 446 - DNA, 1410 bp, Unknown
  Ga0209249_1001676  JGI
atggatgctcgtaataatgttggacacccaactagacgtgttggatggattaacaagaaattacgagatggtactgctaagaagctcaaacaatatacaaatgtaatacaagtacaattattagataagaaatttaatacacaagagactgttgattgtgaattccggatcggaattgatcctggatatcaacatattggtttctgtatgtacaagatctacaacaataagattacaaaattattctctggagaagtaactactagaacagaggagatcaaacgattattatcagagcgtaagatgtatcgaaaagctaggcgacgatgtagacgtgagaatgttaaacgtaagtttggagctcgtaagtttcgacatcccagatggaagaatcgaagagacaagcttgattggaatcctactctcagacatttgatagaagttcattgtaatttgatgaataagatcacaaatctggttggattaaatcaaatgaaagtgcatgttgaatactcgacgtttgatatacataaactggttaatcctggtgtaagatcattttggtatcaactaggaccaaaatatgggtatcagaattcaaagttgtactcaaagaaacgagatggttattactgtcaagtgtgcaaatctagggacatccctaatcttacgatacatcatattgttcaacagattgatggtggtacagatcgtccagataatcttgtgactgtctgtagaaagtgtcatgataagattcatgccggaaagattaaacttagttctaattataaaccgaagatctttcgagatacaggagttctaaattcttgtatgaagaagatctttgaaaccttcgaagatgtaattccaactcaaaacacttatggatacataactgatgttatgagaaagagtcaagatctagagaagacacattcattagatgcaagtataattgctttgtgtgattcacttgggtttcaagaagaatttaatgattatgatttcgaagatcttaagaatgagttagaatttgtacagaaaagaagacatgtacgtactcatacaacgagactcgaagatcgtaagtattatcatgatgattacattgttgctaaaaatcgacggagacgagagactcagaaagatgatagtcttgaggactttcgaaaagattttccacgattacaaatgactgtgaaacctggagttaagagaccaagaatatcgaatacaaaagttctctttaaacctggtgacaaagtcttgtataataatcaaatttgtacttgttatgggtggggttctactcatggtgaagtcggattaattgaagttggatcttatgtcaagactcgtctaagtaaagtacttgcaaaaaatagtggactcgtatgcttacattga

SEQ ID NO: 447 - DNA, 260 bp, Unknown
  Ga0209249_1001676 JGI
gtcaacgactacccactaaaagtgggtagcttgtaattagttctaaagaacgttttacaagccattgttttaatggggttgaacagacgtttgactagtggttcaccaacgaatgccactcccagttcgttgctctggaggttaagtacaatcctagtcctcattgccgattagtaggtaacgaaaaccggtattactgctagccaagtcgggggagactaagctttaaaggaatgtttccacaccataggagacacaaa

SEQ ID NO: 448 - DNA, 1422 bp, Unknown
  Ga0116188_1006392 JGI
gtgaaacttgagggtaattggttgattagggggcttaatttggaaggaattatgcagacgttacaaagagagttcaagaacgtacctacggatgcttcactagtctgtagctctacaagtcgtgcgttaaacagagaggaaactctcagtgctcatggcaaagtactgatttgtaacaaccccgaagtgaatcaaccccagcaaggaggggattcgaacttgagagtatcgaatattgtctttgtactttctatgagtggcaagacgttaatgccatgtaaaccacaaaaagctaagaaattgttaaaaggaggtaaagctaatgttgtaaaaagatttccatttacgattcgattaactatgggtactggtgagacagtacaggatattaatttaggcattgatagtggttataagcatgttggattttcaagtataacagaaaaagaagagttgttttcaggaacattaaatcttgatctaaagactaaagatagacttaatgagaaaaagatgtatcgcaggaatcgcagaaataagttaagatatagaaagtcaagatttaataataggaaacgaaaagataattggctaccaccatcaattgagagaaaatatcaaactcatttgactttgatagaaaaaattaaaaatctattacctattaaaaatgttatagttgaggtagcaaaatttgatatacaaaaaataatgaatcccaaaattaatggtaaagaatatcagcaaggcaatctttttaattatcagaatatggttagttatttacaggtaaggcaaaataatatctgtccttattgtaaaaaagaatttaaaggtgagccaaaagctacacatcatatttatagacatggagattcaagaagatctaatagacctgatggtttattgcttttacataaaagttgccatgtagatttacacgaaaaacatagagaaaaagagtttcaaaaacctgttaaaaggtatgagccttcaacttttatgtctataatacataagagattttatgaagatattacaggtttgcaggtaacttatggttatattacacaaatgaagcataacgaatataatatagaaaaaactcatttcaatgatgcttttattattgcaggtggaactcaacaagtaagatgtaaacctataattatagagcaaagacatagaaataatagggttttgcagttaaataggaaaggttttaaaccatcaattaaaagagaaagaagtaaaatattgccgaaagatttgttttggtcaaataatattaaatatacttgcaaagggatgtttaataaaggtaaatatgttttatttggtgactctaaaaagaaagaatatattaagtttacattaatagataagatttacaattttggaagttttgtatggaatatctaa

SEQ ID NO: 449 - DNA, 236 bp, Unknown
  Ga0116188_1006392 JGI
gtcaatcacccctgaataaattcaggggcttgagttgtgaaacttgagggtaattggttgattagggggcttaatttggaaggaattatgcagacgttacaaagagagttcaagaacgtacctacggatgcttcactagtctgtagctctacaagtcgtgcgttaaacagagaggaaactctcagtgctcatggcaaagtactgatttgtaacaaccccgaagtgaatcaacccca

SEQ ID NO: 450 - DNA, 1575 bp, Unknown
  Ga0307376_10003019 JGI
ttgaatcaaagcgaaacaagacccgaacaggaaccaatctttgtcatatcaaagtcggggaaatccttggcgccaacccgtcgtcccggcaaagtgcggcatcttctcaaggacggaaaagcccgtatctattgctacgaaccattcactatccaactaacttacgagagcatcgagtttgttcctgtagaaataaccttgggtattgaccctggttccagcgacactccgatagccgctgaagagcatgtgcctggttcaggcatatgctccatcatctacgcgaaagagatcctgctgcggacagacatctcggcgcaattgaagcgcaggtctggtgttcgacgtagacgcagaggtgataagatacgccaccgtaaaccaagatttgataatcgggtgaagtcagtctgttcggtctttggtaaaaaacgcacccctaaacactggaagaaggtcaatcgtaaaaaaggcggtaaaagcctaaagaaagtagaaaacggaagggctgcgatctgtcgtaaatgtcaacatgaacgggttggcgagaaagggaaacatgatgccgacaagatcctcaatcccacgcttcagaacaaagttaacgccatcgtatccgaggtcaagaaattggttgagataatgcccgtgacgaagatccgagtagagttgactgctttcgacacccagaagatggccaatcccaaaattcagggagaggaataccagcaaggtacattgttcggatacgaggtgaaggaatatcttctccataagtatggccataaatgcgtttactgtaagggtaagagtaggaatcccgtcttggaagtcgagcatgtcatcccgaagaaacgtggcggaacgaatatagtatctaatctggtaattgcatgtgaaacgtgcaatcgtgaaaagggttcacgaaccgctgatgaatacagttttcctaatatccaaaaacaagcggtaaagtttcgggccttccgttacagcgcattgacccagagttacaaatgggcactctggcgggaactgaagaaacttggcataccggttgaagcaacatttggatatcagacaaagtattaccggttgaagatgcgtttgcctaaagcccaggtagttgacgcgatggtgatagcatccggtggtcgcagttttgatctgccgacgcaatgtctgatcgaaaggcgcctcaaggcgcggaagcctttccaccgactttcgaacgaaaacaagaaaggcaagacatgtgagaaaactcccgcgatgagacaaatcaatggttttcgcttatacgataaggtgtcttttgttgatgggaatggcataagggtctatggttatgtcaccgggttgcgtactcggggaacctttgaggtgtcccacttggaaggaaatatgatctcggacaaggattggaagaaacttaagttggaagaccatatgtatcgaaacaaattgatcgagaaacgctcaattatcggtacgattctcaaaactctgaagggtaagggtattccgaaatggattcaggaaagggggtgcgccggcgctcctccccatggataa

SEQ ID NO: 451 - DNA, 368 bp, Unknown
  Ga0307376_10003019 JGI
gtcaattaccccacgcctaaagccgggggcttgagggagaaatcctgatagtcttaggttttagacgggagcgaaagctccataagagacagcctaagtcttaactgactacgttctttcgaatatcagacagctggatgaaactgatcttctccgggtcagccagtctggcataactttctggaggctctgtaaaagtccttttggggatgggacagtcaacctcgggacgacctgccattgcaggcaattcgaaagaacattggctgggaaatgaacggacgaaagtccgcattattccccgcaaggggaaccaaggagaggtatttccattgaatcaaagcgaaacaagacccgaacaggaacca

SEQ ID NO: 452 - DNA, 1443 bp, Unknown
  Ga0247608_10100524 JGI
atgaaagcggaacaggtgaaacgccgtaaaggagatgaaccggatcctgtcaaggagaccggcaagggagtccccgtctatgtgcaggacaaggacgggaatcccctcatgccgacgttccggaacggcaaggtacggaggatgctcaaggatggtctcgccgttgtcgtgaggggatgccccttcactatccgcctcacctatgagccgaagactcaggtggtccagagggtcaccctcgggatcgacccgggatacggcactgtcggcttctcggcgggtacgatcgtgcgtgagctcatttgcggtgaagtggtccttcggaacgacgtcgtggagaaggtgtcgacaaagcgcgaattgcgaaagaccagacgctccaggaagcttcgctaccgtgccccaaggttcaacaacaggaagaggaagaagggcagcttgagcccgtccgtgcgctcgaggtgcgacgcccacctgtcggtcataaggaccgtgtgctccgtgcttccggtaaagaggatcttcgtcgagatgacgagtttcgacgtccggaagctcaaggacccggaagtgtcgggggaagggtatcagcacggagagagggacggcttcttcaacactagggaatatgtcctccaccgggacggacaccgttgccgcaactgcggcggcaagtccggcgacaggatcctcgaggtgcatcacctcgagagcaggaaaaccggaggcgacagccccgggaacctcgtcaccctgtgcaggacctgccacacgggataccatgcgggcacggtcgaacttaagataaagcgtgccgcccctctcaagtctgcgaccgtgatgaacatgatgaagggaaggcttttcctctcactgagaaaggcatatcccgacaaggaggtgctcgggtccttcgcctaccagacgaagtcgcacaggatagacgagggactcgggaagagtcacgcgaacgacgcctactgcatatccggcaacttgggggccgaccgctgcccggtcttcatccgggggaagcagatccccagacacacgaggagcctccacgtgcagaagacttcgaaaggagggaagaggagaagcacggtagccccgcaccggatcgggaagtccgacctccagagatacgacgtcgtgaagtaccgcggggaaaaggcggtcatcgccggcagcacgaacggaaggccggtcctccgcgacatggactggaagaccacgaaggaggcgtcggtgaacgcgaagaaagtgaagttcctgtaccggagacaaggatcgatcatctacatgagctcccccgccagggagacggaacttaagcggggcgccaccctgtgggacacctggatggagttcatcgaccgtaatcaggagtactgggatgatcttgcgagggagttcgccggaatgaaaaaatcggagcaatga

SEQ ID NO: 453 - DNA, 413 bp, Unknown
  Ga0247608_10100524 JGI
ctcaactttcgcaagtgaatcccaagtcactgaaagggtccattggccgccctgcgaagggggttagccggagtccccgccaataatagggaactacgttcggaagaatactgcaaaggataggcactccgggatggtcgccctagtcccggacactgcgggtcggagttaatggagcgaaagcgacggtgctccgtccacgaaaccttaccgaacatcggcgaagggcgctttgaccttccggtcctccggaaggacttatccctgaacaggggatgcggaacggttctccgttctgtccggtcagctccggacaagaatgaaccgaaaaaactaagagtccgcattgcggacaaaacaaacaaaagacgcaatgatgaaagcggaacaggtgaaacgccgtaaaggagatg

SEQ ID NO: 454 - DNA, 972 bp, Unknown
  Ga0194060_10004581 JGI
atggaaatcaatcacttggagcagaaagtgcaaaaatcgcaaggggggtctaaacggttactgaataagatgttgccgtttactatccgcatcgttgatctcaaggccgaaaactgcgcgtttcaggcactgcgcgtcaaacttgaccctggaagcaaggaaacaggcattgcgctggtgcgtgagacagaaagcagtggcatcgctgtactcaacttgtttgagttggctcaccgtggccagcagatcagcgaagccttgacatcaaggcgcgggcatcgcaggttacgcagggcaaaacttcgctaccgttcgccccgttttgataaccgtgccaatcagcaaagcggctggcttgcgcccagcctgaaacatcgggtcgatacgacactggcctgggtaaaacggattgaaagtttgacccccatttcagccatcagcacagaacttgttcgatttaatatgcaggcgctggagaatcctgaaattgaaggggcgcagtatcaacagggaacacttgcagggtacgagatgcgcgagtatctgttggagaaatggggccggacttgtgcctattgcgataccaaaaatgtccccttacaaattgagcacattcatccaaaatcacaaggtggctcaaaccgcattagcaacctcacactggcttgtcagtgctgcaacacaaaaaaatcagctttaccaattgaagtgtttttagccaaacaaccagagcgtctaaagcatatcaaggcacaggccaagcggccactcaaggatgctgcggcgctcaattcaacccgatgggcgcttgtcaatgcacttaaaacgcacgaactggcgattgaaaccgcatcaggtggcagaacaaaattcaatcgacatcagttttgcattccaaaaactcatgcgcttgatgccgcttgtgttggtgaagttggatcaatcacagattggcaaaagccgaccctgtga

SEQ ID NO: 455 - DNA, 316 bp, Unknown
  Ga0194060_10004581 JGI
gtcaatctcccctgcctaaaggcaggggcttggagtcgaaagacaacgagttaggtttaaacagggaaagcggtaaccaacccgctacgttaataacatgtcgtcaagacgcaccagcaaatgcttccccagcctgtcggcagacaggtcagtttgctgcactgcaaaacttgaatcatgcaaaccaaaggtaaatggtcgaatgttttagtcgcgactcgcaagggtgggagccggttactgacattcccgatgggagatgagctgcaaggcttacgtcactaggcccgtaagggcaaaaggattgtttatggca

SEQ ID NO: 456 - DNA, 1257 bp, Unknown
  Ga0209056_10004009  WGS
gtgaacgtgtttgtattagcgcctgacaaaaagccactcatgccgactacgccgcgcagggctagggtgtggctcaagcagaagcgagcgcgaattgtcaatcgcacaccatttactatccaactgcgtttcgaacccagcagtggatacgcccagcatgtgaaggtgggagtggatacaggttcaaagactgtcggagttgcagctcttgctcactcccaagttctctatcaggcagagattagcttgcgtacggacattaaacgaaggttggaccaacgaagacaatatcggcgcaatcgtcgaagccgcaagacacgctaccgcccagttcgatttaacaatcggaagaagccgagaggttggttccccccatcgctgtgctctaaagccaaggcgacggtaacggcggtcgtgcaggtggctcgcatcttaccagtaaagcacgtcagggtggaggtggctagtttcgatacgcagaagatgcaatttcctgaaatttcgggagttgagtaccaacggggagagctgatgggctaccatgtgcgcgaatacctgttggcgaagtgggggaggaagtgtgcctattgcagtagggagggcatgccccttcaggtcgagcacattatacctagaatcagaggcggcaccaatcgcgtgtccaaccttactttggcttgtgagacctgtaaccaggcgaaggggaatcgcactgctgaagagttcggctacccagatatacaagcacatgctctgaaacctttgagagatgctgtacaggtttccatcataaagccatggataatcgggaccctgtcaagactattgggtcaagaaaatgtttcgaccacctatggctatgagaccaagtacaagcgaatgaaaatgttgaagctgcctaagacgcactattttgatgcggttgcaattgcctgcgagcttggggaaatagttatgccaggcacggtatggtatcaattcaagtgcgtcccacgcggtagttatcagctctataacgggagtcggagcgagcacagagtgtcaggtccgaagaaagtatttggctggaagctgtttgagcttgtcaaggtcaatggtcaagtaggctacatcagtggacgtagggtaagtggccgcttctcagtgaaagacgcgattactggcaagctattggtggatggcataggccacaagaagatcatccgattagcaagagctacgcacggcttgattgtacacgttaatttagttcagtga

SEQ ID NO: 457 - DNA, 289 bp, Unknown
  SL_8KL_010_SEDDRAFT_10003558 JGI
gtcaacgaccatcgctgaaatgtggtggcctggagagcaacctccaggccgtgttgaccagactcagcctttgagggcactcctgctgtgcaggcttacatcaggtggtccggaaaaggctacgattgcgctaagagtttaagttcgtaccctggagtactgcctcagctccaggctctacaactcctggattaaacgttcgtgaggtcagcgacagtgtccaggagaaagtaccgggtgcaatcattgtcgaggggaaagcctgtactccgaaaggagctttacacgt

SEQ ID NO: 458 - DNA, 999 bp, Streptomyces sp. NL15-2K
atgggcgaggggagaccgacgggcacggcaccgaggcccgtcggcgtcacgccaagcacgttgccacggcagcggaggcggcagagaacgggggcggtgacgcttccacgcacaatccggcgtacgcgggcggtgtcggcgcaagcagggtcttcgtcctctccaaggacgggaagccactctggaaccggcctcgccctcaccgacgataagaaggaagtcgacgggcaaggagttgtgatcaccgtcaggcgggggttggtctcggttgaactccagcaccgcggtgaacagatccgcctgtgcatgcggcagcgcgcgggctaccggcacaggcgccgctccgccaaccgccgctaccgagcaccccgtccggacaaccggccccgtccagcaggatggctaccgccctccctacgccaccgtgtcgataccgcctactccttggcgtctcgcctctgccgctacgcaccggtcactgaaattcatgtggaacacgttgccttcgacgtccactccatgagtacgggcaggcccttcgccggggtggagtaccagcgaggaactctggccgggatcgaatcccgcgcctacctccacgccaagtggaacagcgcctgcgcttactgcgacgccacgggcgtgcccttgaacgtcgagcacctcagaccccgcagccgagggggctcaaatcgcatttccaacctcgtcctagcctgcgtcccctgcaacaaggccaaggacaacatgcccgtcgaggtcttcctcgccgaccgccccgcccgcctcgcccgcctcgcccgcctcgcgaagatcctccggcaagccaggacaccgctcaacgacgctaccgcgatgaacgcgaccctctggcagcttgtaaaggcgctggggaccctcggcagaccagtgcatccctggtcgggtgcgcgcacaatgtggaaccgcgaggccatggggctcgacaagacgcacacgatggccttccggtccgaatga

SEQ ID NO: 459 - DNA, 400 bp, Streptomyces sp. NL15-2K
gttttcggtacccggacgtgcgaggtcagtcgctccccgaccgcaaggttgccggctgaccagccccagtcatcgagatctgaagatcaaggaggtgccctagatgactacgtttcccgcaggcgagcagacccacgaggctgtgcttcctcagcagcctgctctggaatccgtgggagcagacacccctgggagaagggacgaaacggctcagggacaccccgccatcgggcggggcaccggcagggaacatgggcgaggggagaccgacgggcacggcaccgaggcccgtcggcgtcacgccaagcacgttgccacggcagcggaggcggcagagaacgggggcggtgacgcttccacgcacaatccggcgtacgcgggcggtgtcggcgcaagcagg

SEQ ID NO: 460 - DNA, 798 bp, Unknown
  Ga0376465_0015542 JGI
atgagagtattcgtactgaacatgcgtggcgaaccattgatgccatgcacacagagaaaagcccgtatccttctaaaagaagggaaggctgaaatacaccgatacgatccgttcacgatacagcttacttatgctacaggtgaaacaaaacaggactgtcatatcggtgtggacaccggaagcaagcatatcggacttgcggtaacatccggaaacaaagttttgttcaaaggagaagtcgaactgcgacaggatgtaaaaccgaagattgatgcacgcagatggtaccgcagggacaggcggaaccgcaagaccagatacagaaaagcaagatttcttaaccgcaagaaatctaagaaatggctgccgccgagtatccagaacagggtcaaccatacataccattggatcgccgtgctgcagagtcttgtgccggaagcagaactccacgtagaagtcggcaagtttgatactgctaagatgataaatccggacatcaatggagtggattaccagcacgggcagacctacggtttctatgatgaacggtactttgtgttcgcaagggatgattacacctgtcaggtatgcggtaaatccagtggcaagatactgcagacgcaccatatcgtttaccggagcaatggcggcacggacagggtggataacctcataaccgtatgtaccgactgccacacctcagaaaaccacaagaagggcggaatcctttataagtggcaggaggaacacaagaaggtaaagcagtataaggaaccgccgtttatgaacacactccgc

SEQ ID NO: 461 - DNA, 288 bp, Unknown
  Ga0376465_0015542 JGI
gtcaaccaccccgacctatggctaatgccttagaggtcggagcttgtaaaagctcagattgactagcctaagtccttcggggactacgttgtttatgttatcacacctacgaatgattacctagttcgtagcaactgtgcaggcactgtaaaagttctgtgaggcaggaacggtcaacctggtattgccgattacggaaagcatttacaacattggcgaaggtaaacaaactttcataggaaaggggcggcacctgcgggtagccgccaaaggtaacaagtaatgaga

SEQ ID NO: 462 - DNA, 1377 bp, Unknown
  Ga0373622_0034557 JGI
atgaaaaagcagacgttaaaacagagagcgattaaatcgaacacacctacggatgcttcacaagtccgtagcaactgtggtttgtcattaaacagagatgaaagtctcagtgtggcgagctcaaaaacctgttttaacaatcccgaagtgaatcaactccaatcacgggcaggaggacttaaagtcaacgtgcctgtactttcgctaagggggaaaccgcttatgccctgctctccagcgaaagcccgaaaactattaaaacagggaaaggcgaaagtggtcaagcgaataccatttattatcaaactcaattttgcttgtgaaaacaaaacgcagagaattactttcggacttgattgcggatacgccaatattggattctctgcaatcacttctaagaaagagctcatctctggaagcgtatgtattgacaacaaaacatccgaacgaattaccgacaagagtatgtatcgcaggaatcggaggaggaggttgcgctatcgtcagcgtaggtacttgaacagaaagagttctaagaagcaaattccgccatcagtacaacgaaggattgatacgcacattcaattagttagaagatgggcaaaatggattcctataacaaaagtaaatattgagattgctaatttcgatattcaaaaaatcatcaatcaaaatatcaaaggcaagcagtatgctcagggaaatttatatggatacgaaaacttaaaagcgtatatcatagcgcgagaatatagcaagtgtcagttatgtaaaaatgggatggataagcaaggatggcatctacaccatattatcgaaagagcaaatggcggaacgaataggtcagacaacatcgcattacttcacaaaagatgtcacaagaagttacatacaaaagggctaaaactaaagcctaatagtcaatttaaggctgagacatttatgtcaatagcaaaatggcgcattgtaaataaattaaaattaaaatttaccacaaaaacaacatttggatatgaaactaaaatcagaagaaatgaattagaattagacaagtcgcatattaatgatgcgtttgtaattgcaaatggaggcaaccaaaacagatgcctaccaataatcatcactcaaaagcacataaataatcgctcgcttggattacagaaaaacggatttcctcttgcatccagaagatgtagatataaaattcagccaaatgatttaatttgggtggacggaaaaaaagaaaccgcaaagggatgttttaaatacggagaatgggttgtattaaagaatgacttatcgaagaaaaggaaatctgtaagcataaatagaatagataaggtgtataattttggaagttttatttatagtaattaa

SEQ ID NO: 463 - DNA, 265 bp, Unknown
  Ga0373622_0034557 JGI
gtcaatctcccagcaatgggcttgagccgtgaggcgcaagggcaacaggttgattagggagcttcaaaatcgaaagatgaaaaagcagacgttaaaacagagagcgattaaatcgaacacacctacggatgcttcacaagtccgtagcaactgtggtttgtcattaaacagagatgaaagtctcagtgtggcgagctcaaaaacctgttttaacaatcccgaagtgaatcaactccaatcacgggcaggaggacttaaagtcaac

SEQ ID NO: 464 - DNA, 1557 bp, Human gut metagenome
atggtttatgtttttgtactggaccgggacgggaacccgctcatgccgaccacccgctgcgggaaggtccgcaggatgctaaaaaacgggcaggctgaggtggttttccggatcccgttcacaatccgcctctgctatgagccggcttctaaggaaacccagcggctggtatacggctgcgacccggggcgtaccaatatcgggagcgccgttgtcagggaaaacggctgctgtgtctacctggacaaatgtgccacaaggaaccgggaaatcccacagctgatggcaaagcgccggcagcaccggcaggcttcccgccgcggcgaacggcttgcaaggaaaaggctggcaaaacggctcgggaccaccacaaagaaactgctggacaggctcctgccgggatatgagaagccggtccgggtgaaggatatcatcaatacggaagcccggtttaacaaccgtttccgcccgaagggctggctgacgcctacggcaaggcagcttttaaggacccacctgaacattctgaagaaggtccggaagatcctgccgataacggatgtggtgctggaagccaacaggtttgcattcatgcaactggacaacccgcatatcttccggtggcagttccagtacggccccctgcatgggaaagggagtgtggaaaatgccgtaaaggagcagcagggcggaacctgtatcttctgtaaacatgagatcgagcattaccaccacatcatcccccggagccggggaggaagcgatacccttccaaatatggcggggttatgcaatgcatgccacgataaagtccataagtcggaagaatggttccggaagctgaagaaaaagaaagccgggctgaataagaaatacggggccctgtccgtgctgaaccagatcatcccgtacctggtggacagttacacggaactgttcccggaccatacctatgtgacagccgggtacagcacgaagcagttccgggaagaccacggcatagaaaaagaccatgacagcgacgccgcctgcatcgcttgcagcattctggagaaggtggacaggatcatattcccgggaatgacataccagatggaacagttccggaggcatgaccgtgccaagataaaatctttccggaacaggtattattacctggggaaagaaaaggtggcggtcaaccggaaaaaggcaattatggcagacccttccgggaaagagaaaaacgggaagcttcagacccaggactcgctggaggactggtttaccaaagaaactgagagaaacggcttgcaggaagcggagagaaagcgttcccgcctgagggcggtgaaaagcatccggatccggaacaacatgcagaggcccctgcctgggagtatctttatctttgagggaaagaggtatctcctgacaggcaatcatggggaatattatcagacaaaagtggcaggaaaaacagtagaattcctgaagtcaaaatgtaggatagcctcggggaaccaggggctggtctataccggacaggtaaaaagcggcgcttcctcccatgtctaa

SEQ ID NO: 465 - DNA, 221 bp, Human gut metagenome
gtcaataactcatgactgaagtcacgagcttgttggatggatgcgcctgcatccatcgggacagcttctggctgatgccgggttattgagcagagcagtgatacgccgatcactccggggcggctccaaactccggacactgtctataggcgtacctatgctatggaaaccttactgccccacggggcaggcttaccgcaaaggagtaacttatggtttat

SEQ ID NO: 466 - DNA, 1185 bp, Unknown
  Ga0373620_0052976 JGI
atgaagactcgaaggtcaactgaactgtctgggcgtggtagcccgaaagcacgcaggggatgctcgcctagtcccctccctctgcgacagtcagtggcgaaggtgaatacaaccaaggcccgtaagggcattttcgctagcgttcctgtcgtagatcgagatcagcagcctctgatgccttgctccgtagctcgtgccttcaagatgattcggagtcggaaggcaacgcccttctacaagaagggactcttctgcgtcaggctgaacgtcgagccttcagcccggcggactcagccgatcgctgtggggatcgatccagggtcgaagaaggaaggcttctcagtcgtctcagcgaagtacaccttcctgaacctccaggcagatgccaggacagggatcaaggagaagatcgagaaccggcgaagcctacgaagatcgcgtagaagtaggaagacgccctgtcgggcacgccgcagcaaccgatcttcactgcgaaataagggtgttcccccgagtacgttggcgcggtgggattggaagctgcggctcctgggaggtctagctaagctctatccggtcaccgacgcgatcgtagaagacatcgctgcgccgacgaagaagtaccagagaaagtggaacaggtccttctcgcctctggaagttggcaaggcttggttctacgcagaggttgcaaagattgcctcgctacagacgcgcaagggttacgagacgaaggctctgcgagagcgctacgggctcccgaagctcaagaacaagatgtccagcgacttctatgcccactgcgtcgacgcttgggtgctagccgcagaagctgtaggcgcagcggctccgacggagaagcacgtcctctgcgtaacgccgctcgactttcgcaggcggtcacttcactaccaagtacctgccgaggcaggtaagcgtgggctgcatggaggcacgcgaagtctaggaagccgtaggggaagcctcgtacgatctccaaagtatggcctcgtatatcttggtggatcatccaaaggccggatttccttgcatgacctagagactgggaagaggttgaccaagagcgaggatcgcacaaagtgcaggatcctgagtcataactcagtcaggttttctgccccgctgagcacggtgctgcgtcgggcagcagaggagtttgtctga

SEQ ID NO: 467 - DNA, 285 bp, Unknown
  Ga0373620_0052976 JGI
atgtccgaggcgaccagcacgtccatctggcggatgttgttgagacgtgcgtcctggttgctcggcataggcagctccatgtcccccaggcgaggcatgggaccggagttagctataacagccagatcgcgtgcgcgacagacacgccactgctggcgagacagttcgccggtagcgaagctcacgcagagctgacaccgtcgggcgcgctcgaaggactgcccgtgcgcccccatccccttgtggtttggatccgacatagctaaccgtgtacgccttatagca

SEQ ID NO: 468 - DNA, 1083 bp, Unknown
  Ga0114925_10000117 JGI
atgccttgtagttcaagaaaagctagactgttacttaaacaaggtagagctaaggttgttagtaagtgttcctttactattcaactactatttggaagttcaggttataaacaagaagtaaaagcttccttaattccaagtagttctaaagtaggagtagcttgttcttctttaggtaaatgtttatattcttctgaagtagaattaagacaagatatttcaaagaaaatgaagaggagagctgtctatagaagaacccgtagaaatagaaagactcgttatagaaaatcaagatttcttaatagaaaatctgatagaaagtttactccaactatgaggtctaaacttgagagtcatgcgagagaggttaaaagaacaactaaactacttcctatcagtagttgggtatttgttaagaactctattaagaaagattatagaggttctaagaatttagaatggttaaatctacaaaggcaaacttttgagagagatagatttaaatgtagttattgtagaggtaaatctaaatgctatgaacttcatgctcatcatttgatactaagaagtgaagtaggtgaagatactttagaaaatcttgtaactctttgtaagacttgtcatatagcttatcataaaggtgaaattgagttaaagaataataaaagtaagggaaaagctaaaattaatactgaacttaatattattagaaagtatttagaacttccaagtagtattagtaaaatttacggctttgaagtcaaagctaaaagaaaagagttagatctggaacctacacctattaacaatgcttgtagtgtcttagagatactaccaaataatagttattatattaaaaatgttcctaaaggagattatcaaagaacaaaaggagttaggagtgaaaaattattacctaaaggtaaaatattagaattttctaagtttgataaagttatatttaaaaacaatacttattttattaaaggtagaatgagcactggttatttcataggaatgaatattttaggtaaagctttgaaaggtaagactttaaaagctaaagaatgcgaactaatttag

SEQ ID NO: 469 - DNA, 291 bp, Unknown
  Ga0114925_10000117 JGI
gtgaattacccatagtgttttcgacaactgtgggcttcaatcgtgagattggagagtaattagttcaccagactcagttgggagaaattctaactacgttatctttgaagtagaaacctactaatgtcgcctcagttagtagctctttcgtggctctgtaaacagagattaaagtctcagtcaaccacaatgcgaagcaaagataacattgtcgagaggaagtagaattccttaactggtaacaggttaagaatactcaatacttaggaataggagatatactcaatgtta

SEQ ID NO: 470 - DNA, 1293 bp, Unknown
  Ga0370498_000007 JGI
atgccaaatttagtacataaacaagttaaatcaatgactagagtatccggtcttcctgctcgtaagagtaggaagattaaggaaactgaatcatcttcctgtggcaaggaaaaatatatttctaatgtttctctagttggaaatccctatgatgatcagtctcgaagagagcaattatccaaattatcgaaaggtaatttggactggaaggtaacttccaaatttgttacgaaaatatatgttccagtaatttcttgtactggagttccattaatgccttgctctccaaggagagcaaaagaattaatgagaaaatataaagcgaaaaagcagtggagatatggtattttctatattaaattactagaaagagatataggaaatattcaagagatatcatgtggaatagattctggatctaagagagaagcgataacggtaaaatccaagaataaaacttttattaatgttttagcagatgctagaacaggagtaaaagaatctcttgaagttagaaaaaatatgagaagggcaagaagatttaaaaaaactccttgtagaaagaataaattaaatagaaaaaggaataaaaactttattccaccatcaacaagggcgagatggaattccaagttaaggttgataaatatattaaagaaaatatatccaatatcgatatatgttgtagaagatataaaggcaaaaactttaaaaggaaagaaaaattggaataagaatttttcaccattagaagtaggaaagaaatatttctataatatattaaaaacatatggaaatcttattttgaaagaaggatgggaaacatttaacaaaagaacagaattaggtttagtaaaaacaactaagaaattagataaaatattttctgcgcataatgttgatagttgggttttggctaatttcccttttaatattcaaacatatcctgaaaatattgatatgtattattttcaacaaattgaattgcatagaagacaattacacatgttacagtttgctaagggagggaaaaggaaaagatatggaggaacagtatctcttggaataccaaagggaacagtagtaatagcaaaatataaaaagaaagaaatatatagttatattggtggaaatatgaatggtaaattatcaatccataatatgcagaatggagaaagaataagtaaatgtataaataaagaagatataaaatatatgggatatatagcaaagtggaaagtagaaaaaataacagaaaataacgagcattcgtggaagaacatgcatatttaa

SEQ ID NO: 471 - DNA, 255 bp, Unknown
  Ga0370498_000007 JGI
ctgtcataacccccatcaagttttcatcttgatcgaggcttgttagagtcatttaatgccaaatttagtacataaacaagttaaatcaatgactagagtatccggtcttcctgctcgtaagagtaggaagattaaggaaactgaatcatcttcctgtggcaaggaaaaatatatttctaatgtttctctagttggaaatccctatgatgatcagtctcgaagagagcaattatccaaattatcgaaaggtaattt

SEQ ID NO: 472 - DNA, 1245 bp, Unknown
  Ga0247608_10002058 JGI
atggtgtacgttttagacatagagggcaagccgttgatgccaactgagaggcacggaaaggtcagaagacttcttcgtgacagcaaggctcatgtcgtaagactgcagccattcacaattcagttggattatgagagtaccacctacaagcaagaagttagtttaggcattgacgcaggcagcgtacatattggagtgtctgcaacaacagagaagaaagagttgttcgctgcggaggttgttcttcggacggacatagtaaagaaacttgcgagccgtcttgaaatgcgtcgcacaaggcgtaaccgcaagactcgttatcgtaagccgaggttcgacaacagacgaagaaaggaaggttggcttgcaccgagtataagaaacaaagtggatagccacataaaggttatccgtttggttcattatttgcttcctgttacaaagaccactatcgaagttgctcagtttgatgcgcagaagataaagaacgatgccattcaaggtgtggagtatcagcagggagaacagatgggtttctggaatgtgagggagtacgttctcgcaagagaccatcatacttgtcagcattgcaaggggaagagcggtgataatattctgaatgttcatcatttggaaagccgaaagactggtggtaatgcacctaacaacctcataacactatgcgagacctgtcataaggcgtaccatcgtggagagtttgagttaaaagtgaagcgtggcacttccttgcgtgacgcagccgttatgaatatcatgcggtgggcggtgtatgaacaggcaaaggcagagtttgggaacgtccatctcacatacggctatgtgactaagcatacacgtattaagaacggaattgaaaagacgcattgcgcggacgctttctgtatcagcaagaatgtaaaagcagtgcgtttaggttcgtatcttaaatgccgttgccttgcaagacatacaagaacattgcatgtatgcagtccgaaaaagggcggtattaggcgtagcgcagtagcaagccactggataggcaagtcacgtctacaaaggtacgatagtgttgagtggaacggagtgaggtgctttatcttcggcagtacacacggcagaccagtattgcgtgacattgacggaaaatctatcactccaaacgcgtcaattaatgccaaagaaatgatttttaaacatagaaacaataagattattatgcaagaattaacttgcgaaacttga

SEQ ID NO: 473 - DNA, 283 bp, Unknown
  Ga0247608_10002058 JGI
ggttataagattcaagtttcgcaagtagtggattagccagtcagtccagcggagcggattagcctaagtcccgattggcaaaagggaactacgttagaggtgaatgatataggcactttcggatggtcgtccaagtctgaaaccctgcggcaagtgattaaaaggagcgaaagcgacggtgttgcttgtaaaaaccacctcataacattggcgatgggcgcataacagcagaaatgctgacttacaacaaaagttgtttaacaattaaaagtaaaaaagaatg

SEQ ID NO: 474 - DNA, 993 bp, Unknown
  Ga0401359_0000081 JGI
atgctacgtctttccaggacatctttactgagatggcgggaagggactaagaacttaactcgaaggattatatccatgttacgagtgccagttttatcaaaatcaggtaaacccttgatgccaaccaaagctagtcgagctagacgttggttggaagaaggaaaagccaaagttgtacacaacgatcttgaatgcttcgcggtgcagttgaccgtctcttctagagaagacttgcagcccgttgctgtaggattagatccaggaaaactctattcgggaattggagtgcaatcgagtcgtgctaccttgtggatggcacatttgattctgccgttcaaaacggttaaagaccgaatggagctacggcggatcatgcgtagagcaagacgagggcgacgaattaatcgcaaaattccatacaatattagaaaatggctgggattagccaaagacaagaaaaacaaggctgatcaaactccagcgacacacgctgttgatggtgttaccttagccgcgtttgagttcattcggtggcgagagtggcactccggttccaacaaacatgggagctggaagggtgacgttcaaatcacacctgcaccctttgcgacgattcgtagaccacctgttagccgtaggcaactgcacttgtgtgttccgtcaaaaggtggaaagcggcgcaagtacggcggcacaattacccgccacggaatcaggaagggtgataaggtaattgccgaaaaagccggaaaagtttatacaggttggtgttctggagacaccaaaaccaaactgtctgtttccgattgttactggaaacgaattggacagtttactgcaaaaaaagttcagttgttgcagcgaagcacaggattaatcgttgtgccttcaactggaccggtcaaaccttaccgcatcgaacggttcggtttgacctggagttcctctccaagttgcttcgctgaacttggagtctcacgaggtttacgatga

SEQ ID NO: 475 - DNA, 250 bp, Unknown
  Ga0401359_0000081 JGI
gttcacgaccctgacttacttcgttgaagtcagggattgtaaggcaaattacaatttaaaccgttgaatatccgcattgagtctcagtatggtacagacttccgaatacttccctcgttcggagcatctctaagactttttgtcgagtcgctagtagagacgtagcatgctacgtctttccaggacatctttactgagatggcgggaagggactaagaacttaactcgaaggattatatccatgttacga

SEQ ID NO: 476 - DNA, 1287 bp, Unknown
  Ga0181589_10009757 JGI
atgcaaaaagtctttgtagtagataaaaacggcagacctctgatgccttgcagtccaacacgctgcaagcagttcaagaaagaaggtcgtagtagagtctatcggttgaaaccattcacgattcaactgatagatgttgaaggtggcgagactaaagatgtcgagtacaaggttgatgctggatcaaagtttactggacttgctctagtgggaaactttgagaagcaaggcaacgtgttgctttgggctgcaaatcttcagcacagaggtcaagaaattaagaatgcccttgagtcaagacgttccttgaggcgaggtagacgcaatcgtaaaaaacgctatcgggctgcacgatggagatttcgcaatggaatcaaaggcggactagcaccatcactgatgagcagagtcaacaacatcaccaattggctaaagaagttgatgaagtatgtgcctgtgaccaagatcgtcagtgagttagtacgattcgatctgcagaaactagtcaatccagagatcagtagcattgagtatcaacaaggcactcttcaaggctatgaggtcaaagagtatcttttggagaagtggggtagacagtgtgtgtactgcaacaaaaaagatgtgccactccaagttgagcatattcatccaagagctaaaggcggaacaaatcgaataggcaatctaacaatctcatgtgccaagtgtaatgagaagaagagtgccagatctatcggagactttctttctggcaaaccaacactgctgaagaagatcaaagctcaaatgggtaagccactgaaggatgctacggcagttaataccacacgctggagattaaaggaagaactagagtcattcggactgccactagagttgagttctggaggaagaacaaagtttaatcgattacaacagggttacaagaaagaccactggctagatgcagcatgtactggttccagtggtgagtctgttagcttaaacagaatcaaaccactacagatcaaggcgatgggtagaggttccagacaagtgatgaagacagacaagtatggattccctagaggatctgctggcacagtcaagcgtgtcaatggcttccagacaggggatctggtgaaactggatcaacctaaagggaagtatgcagggacttggattggtcgtttagtaggagttcgaagtcgtggaattcttgacattatgactcctcttggaaaggcaggagcgacatggaagaacttcaccttattacagcatagtgatggatacgagtatgcttga

SEQ ID NO: 477 - DNA, 288 bp, Unknown
  Ga0181589_10009757 JGI
caccccctttagggggtggctttataaggagaagttcgttgagtccctgacttagcaccacctcaacgcatccatgctgctgaattggtgttatttggctcaaccagactagggcttgtcgaggcccacgatgcacaagaatgatataggcaactcttgaatgcttcaccagttcaagatagcggctttcagttaagttgaggggggtcaggataaccactctgtgctgttagcaaaaaccttgttcatcattgtcgaggtgactgatttttaatcaacaatctttcg

SEQ ID NO: 478 - DNA, 1578 bp, Unknown
  Ga0080699_1005680 JGI
atgtggaccacggaacggaatgcgccatggggctctgccccagacgcgcatgaagggacagatgcccgtgaggccaccctgctttatgcagggatggatcacggggagggcgtaagcccagaaaggaaacttatgacagcagtagcagtaataggcaacacaggcaaaccgctgatgccgaccagcccgtacagggccaggaggcttttaaagtcagggcgtgccaagatctatggatacaggccgttcacgatcatgatccttgacagggaggatggcgctgtgcaggaaattgagtacaaaagcgacacgggttacctgcatgtgggtatctcagtatgttccaaaaaacatgagttcctgcgggaacagagggatctgctccctgatgagcgggagaaacataacgaccggaggaaataccgccggacgagaaggaaccgcaaacgttataggaaaccgcggtttgacaaccgcatcgggaagagccgtaaggcggagaaagagggcggcgtatggctgcctccgtcgctggaacacaaggtggatgcacagctccgtcttttcacccaggcatgcaggatcatgccgataagcagcgcggcatttgagatgggaaagtttgacccggcttgtttaaaagcggaagagagcggtggcccagttccccaaggcgtggattaccagcatggcgggcgttaccaggccgccacaataagggcagctgtttttgcccgggatggacacacatgcctgttctgtggcagggggataaaggatggtgctttccttcacgtacaccatatcgggtattggaagaaagaccgttcgaaccgtctggggaacctggcgacatgctgcgggatgtgccacacatcggaaaaccacaagcctggcggaatcctttacgggaagcagccggaagtatccggactggcccctgccacatacatgaatacggtacgttttgaacttttgagaaggctgaagggaagcgccccggctgtggatatccatatctcctacggggcaaggaccagcatggtccgcaaggaacgggcgatcataaagagccataccaatgacgcttactgcctgggaaggttctttccgaagcacagggcatcagaggaagtgttccagaagacccgccgcaacagccggatactccagaagttctatgatgcggtatatattgacggccgcacaggagaggaagctaagggccaggaacttacgaacggcaggattagcagaaatcataagaaagaccacaaaaatctgcatccattccggagcaggaaagtcagcaaagggcgcgttacgatccggagatccaggacagcgttaaagcctggcagtctggtggaattcaatgacgaagttttgactgtgcatggcacacatacaagccggcataaatccaaaaagacaggcaaaacggctgtcagtatcaatatagagtttaaacagccagccaggaatggcaaaaagagcgcggcattgagcaaatgccggatcattaacaagtcatataatactggctggaaaaagattactgcttcggctttaaaatag

SEQ ID NO: 479 - DNA, 390 bp, Unknown
  Ga0080699_1005680 JGI
gtcaattaccccacctgatccagtgggtcagatggggcttgcaaaaaaaaagagaaagatgaagtttttttttctttttgcaagcccggttgattacccttagcttcggctacgttaccagttaataatataggcaccaggggatactccacacgtcccccgcactgcggcatggtgttaaacatccctgagggaaaggggaagtgcattatgcatgacagcttatcgtataagccgtctaaaacatctgggaacattgggtatgtggaccacggaacggaatgcgccatggggctctgccccagacgcgcatgaagggacagatgcccgtgaggccaccctgctttatgcagggatggatcacggggagggcgtaagcccagaaaggaa

SEQ ID NO: 480 - DNA, 738 bp, Fischerella sp. PCC 9431
atgtccaaagtatttgttttagattcagaaaaaagaccactcttaccaattcatccagcacaggcaaggcaactattacgaaacaaaaaagcagcagtatttagacaattcccattcacaattattttgaagggagctagtccagatgcacctacaacagatttacgaattaagattgaccccggtgcaaaatatacaggaattgcgctagtcaacgatattactggagaagttgtatttgcagcagcagtcaacgctactagatttgctttacttaaagttttgaaatcaacaggtttaccagttgaatgtggttcaggagggctaacaaagttcaatcgtaatcaacagaatttagcgaaagctcattggctggatgctgcttgtgttgggaagtccacaccgattcttaatatcaaaggtattaaaccattgttgattacagccaatgggcatggtactcgccagtcatgccgaacggataaatttggatttccgagcagatatgtgcctagatttaaatttgtcaaaggttttcaaactggagatattgttaaagctattgtcaccaacggtaagaagattggtgtgtatgtagggcgtgtagctgtgcgttctacgggtagctttaacatttcagctaaacaaggattgattcaaggaatcagtttcaaatattgtttacccattcataaaaaggacggttacgcatatgcgtttggatttgacggcgaatga

SEQ ID NO: 481 - DNA, 242 bp, Fischerella sp. PCC 9431
gtcataaagcccagccctaaagggcggggcttgaaagaagctctatatgaccagcttaagtcttaattgactacgtttaaggcaagagttaaagacctaccagggaatgcgtagctagttccctgctctagaaccaaactgttaaacagatgtacaagggttaagtcagtgcagtttggatagtaccgaccttaaacattagcgaagctaacattacccgcaaggagggacttatgtccaaa

SEQ ID NO: 482 - DNA, 1335 bp, Unknown
  Ga0310136_005546 JGI
atgttgttgttcactgttgacaaatgcggcaaacctgggcatccaactagaaggtttgacatgataagaaagcttaaaaagcagggcagggtaagaatcgtcggtggtggcgcttccggcaaaccgccggtggtagtctttctggatagggaattcgattattcaaaaactgcagaaagaaagcttgtcatagcgcttgacccggggtatagatatatcggctttggggtctgcgaaccaaaaagcgggaaactaacagtgtactgcaaaggtgttcttgaaacgaggatacccgaaatcaaagggctaatgacagaaagaaggatgcatcggagatttagacgttactgttcccgccataagaaaaggcgtttatccaagcggcaaggcagaagtctaacaaaattcaaagcgccgagaaatgtaagaggcaagaacagggacaatgctacactcaagcatggcgtagagacacatatcaatctttgcggcaggcttttgaagttctttccatttcctaaacatcaggtcgtttttgtcatggaggacaacgtttttgacgtcagggcaatgacctggggcaagacatacggtgcaggatatcagaaatcgccgagaacagaagttgaaaagcgatgtgtaatctgcggttcgacggagaacttgcacaagcaccacataatacagcgtaaagacggaggaacggacattgacgaaaatctggtttacctctgcagggactgtcatgaagatgtgcacgccgggcgggtatatattcccataaaaggcatgaagcagtggcgcgcattgggaacgatgaacgccataataggcgaactgcggaagataccctggttagaattcatccctgcgccggatgcggcaaaggcgagaaaaacagctgggcttgaaaagggacatgggaacgacgcattggcaacagcggcggcttactgcaatcccgctgaaattgacacaacacaatcaatggaactgcatcttgttaaggtaagaaggcacagcagggcgcggatacatgctgtgagagacaggctatacaaagtaaatgggaaaattgtagccaggaatagacagaaaagaaccgatcaaatggagccgtctttggctgatgtgctgccttttaccccagcgcagcagagggatctgaaagtgtatccaggagtcaaagtgctcaaaccgtttaggagagacatgccgtccgtggaaggcgatgtgtgggttcatttagcgacaggaaagcgttttatagtgaccagcgtaatatcgaagaattacctgtattctccgcagttgagagagattgtggggaaaccc

SEQ ID NO: 483 - DNA, 246 bp, Unknown
  Ga0310136_005546 JGI
gtcaactacccctgattaaaatcaggggcttgccagcagggggcgtgctgctggcgggtctgttaacggcaggtagttgaacgcgggtgtgcggcggcgggaactgacgttccgggacgacactcccagttccgggagacagcggtgaaatcccgcagccttacacagggtgctgccgcacgcctcggggagacccaccgccttttggcgcccggatcacagggctcctgaacgaggagggaaagc

SEQ ID NO: 484 - DNA, 1395 bp, Unknown
  Ga0063591_100011 JGI
gtgttcgtgttggatcgcagcggcaagccgctgatgccgtgcagcgagaagcgcgccaggaagctcctggccgccggtcgtgcgcgcgtgcatcggctgtacccgtttgcggttcggctcgttgaccggcacgtcgaagactgcgcgttgcagcccctgcgcctatcaactgaccctggcagcaaggtcacaggcattgcgctggcgcgcatcgagccaaagctcgtcgccgagactgatgaaattctcgagccggtgatgcacatcagcgtgttgatggagatcacgcaccgaggcgcgcagatcaaaaaagacctgcaaagtcgcgccgcgctgcgtcgcggccgccgcagccgcaacctgcggtaccgcgcgccacgctttgacaaccgcacgcgtcctgacggctggctggcgccaagcctgcagcaccgcgttgacaccacgctgtcgtgggtgcgccggcttctccgccttgccgccgtcacgcacctagcccaagagctggtgcgcttcgacatgcaggccatgcaagctgaagaggaaggcaacccgcaaggcaataccatcgaaggccttgagtaccagcgcggcacactcgcaggctacgagcttggcgagtacctgctggccaagtggaatcggacttgcgcctactgcgacaagaccgacgtgcccctcgagaaggagcacatcgtcgcgcgcagcaaaggtggctccaaccgcgtcagcaacctgacgctggcctgccggccgtgcaaccaaaagaaggcagcgcgcgatgtgcgcgagttcctcgctaaagagccgctgcgcctgcagcgcatcttggccaacgccaaagcgcccctcaaggatgcggccgccgtcaacaccacccgctgggcgctgctgggcgcgctcaagcgcacaggcctgcccgtcgagacaggctcgggtggccggacaaagttcaaccggacgcgactgggcattcccaaaacccacgcgctggacgcggcgtgcgtcggtgcggtcagcgacgtgcgtcggccggcgcagccggccatccaagtcaagtgcgcaggccgcggctcgcgcagccgcacgcgcaacgatgcctttggcttcccgcgcggccacctgatgcgcgagaagtcgatcaagggcttccgtaccggtgacatggttcgagcgaccgtgacgcaaggcaagaagtctggtgtgcacaccggccgcgtcgctgtgcgcgcgaccggcagcttcaacatccagacgcccggcggcgtcgttcagggcatcagccacaagcattgcgtcgtgctcatgcgaggcgacggctactcgtactcaagaaccgcctcagcagggcaagccaaagaaaggacgcgggaagctggtcacgctatcgcgtga

SEQ ID NO: 485 - DNA, 325 bp, Unknown
  Ga0063591_100011 JGI
gtcaatcaccccacgactgaagtcgggggctgaagaagcaaaaacttcgacagccctggttgaccagaccaagaaaggatttcgaaagaacaccaatctacgttgcacacaggtcgcaagaccgacggcaggatgcttctccagtcctgccctctcgaagtcacggaagcagacaagccaaggggttggcacgaaacggtccgtggcctggtggcgcatgtcaccaaagccggtgtgcaacatggtcgaggagagcgccaaagccgcaaggcggaggccgtcacaaggcccgtaagggcgtttacatagaggaatcgacgtgtca

SEQ ID NO: 486 - DNA, 1707 bp, Branchiibius hedensis
atgtctacgttgcacacgggtgcgcgaacccaccggcgggtgcttcctcagcctgccgctctggaatcggtgccagcagacaaccccggggtagggacgaaacggggcaccgacatcccgcgcacggcgcaagccgggcggcgggacaccggtgtgcaacatggtcgaggggagaccaccgggggcgcacctgtacccggcggcgtagcagcagtacccgcagggcgtaagcccagcagcaccaagcaacacagcgccacccagcagaaccgcaccacccgcatcaccagcagccccaagcagtctcggttcacggctgacaacgcggtcgtgttcgtgctggaccggcacaagcggccgttgatgccgaccgattgcaaacgagccaagaagttgttggcgcggggtcgggcggttgtgcaccgcaaggtgccgttcacgatccggttgaaagaccgcacggtcgatcagtcgatgctggaaccgctcggactggggatcgaccccggctcccagcacaccggactctccctcgacaaaaccgtggaggctgttgacgagagtacgggagaagtgaccacgacccgcaccgggctgtggcttggacagttggaccatcgcggccagcatattcacctgcgtttggtggcacgggcccagcggcgtcggggtcgacgtgggcgaaacctccgccatcgcgcagcccgcaataggaaccggagcgtgcgcgttggctggctgccgccgtcggtgcagcaccgggtggactccactatgacgtgcgtaacgcgactccagtcgctcgcaccgatcgcaagtctgcggttggaacgcgtcagcttcgacactcatgcgatgaccgcaccgggcattagcggtttggaataccagcagggcacgctggccgggaccgaaatccgtgagtacctgctagcgaagttctgtcaccggtgtgtctactgcgacgccaccggcgttggaacgggctcggtgccgttgaacatcgaccacctgttgcctcgtgcccgcggcgggactaaccgagtcagcaaccttgtcctggcctgcgtccgatgcaaccaagccaagggtgcccggtcggtggatgcgttcgtaactgacggagtgagacgcgctcggatcaaagccgaggccaaaacgccgctgcgggatgcggcagccatgaacgcttgccgcaaccggctcgcggcagaactagacgcgaccgggctgccggtggagtgggccagtggcggacgcaccaaatggaaccgcgtgcgtaacggtgtgccgaaagaccacagcttggacgcgctctgcgttggcgccgtcgacgtgatcgtccgatgggtacccacagtgctgcacattcagtgtgtcgggcgtggccggtaccagcgcgtaacgacagacaggttcggcttccctcgttcccaccggccacggcggaaacagcactacgggttcatcaccggcgaccttgtgaaggctgtgatcccaacggggccgaaggcgggtgtctaccgcggccgggtcatcgtgcgatccaccaggacgttccggcttgtgaccccaacgcaccggtacgacgggatcaactgcagatacatgacaactatgcagcgaggtgacggctactcatacaaggccagaccgtcgctgcagcgccgcctcgccccgcatggcgaccaaacgaaagcagcctga

SEQ ID NO: 487 - DNA, 270 bp, Branchiibius hedensis
gtcgacgaccctgccctctctccgggctcgttgaccagaccaagacatcagtgatttggaggtgaccaagatgtctacgttgcacacgggtgcgcgaacccaccggcgggtgcttcctcagcctgccgctctggaatcggtgccagcagacaaccccggggtagggacgaaacggggcaccgacatcccgcgcacggcgcaagccgggcggcgggacaccggtgtgcaacatggtcgaggggagaccaccgggggcgcacctgtacccgg

SEQ ID NO: 488 - DNA, 1614 bp, Brevibacterium aurantiacum
atgcctcctcagtcccaggctctcgaatctgtgccagcagacaaggacggggtatctacgaaacggggcacagaagttgaaaccatttcagcaccgggtgttcaacatggtcgagaggagacagccgtacccacacccaaagacgtggtcacggttgcgcaacagcgaaacccaaacgggaatcgcagtcaccggggtaactcggtacaaccacgtgtcttcgtcctcgataagaggaagaagccgctggatcccacctcaccagctcgcgcacgcgagctcttaaagaagggacgcgcccgtgtccacaagatgatgcccttcaccatccgcctcatcgacagaatagtcgccgactcagtcgtccacgaccacacgatcggcatcgacccaggctcccgcaccacgggcattgctgtagcgcgagagacccgaaccgtagatgaggcgacgggcgaaatcacgactgatcgccaagcggtctctctcgttgaacttgtccatcgtgggccacagatcaagaagaagctccagcagagggcagggtaccggcgggggcgcaggtcacggaatctcaggtatcgcgcaccgcggttcaacaaccgtacgaagccaaaaggatggttgccaccatcgttacagcaccgtgtggattcgacgatgacgtgggtcaacaggttccaacatctggcacctgtgtcgaaggtggcatatgaggctgtgcgattcgatactcaaaagcttcagaatccagagatcacgggtgtcgagtatcagcttggtacgttggcaggattcgaggttcgcgaatatttgctggagaagttcaaccgcacctgcgtctattgcgacgcgacgaatgtgccgctgaatattgatcatgttcacccgcgtgctcgtggtggcagtgaccgagtttcgaatctcgtgaccgcatgtattctctgtaatcaagctaagggcaagttgttagttgaggagttcgtttccgaccgcaagcgactggaacatattaggaagcagctgaaagtatgtctgcgtgatgcggcaatcgtgaccgcaactaggtggagtttgcacacagcattgatgacaaccggcctgtatgtagttgcttcatcaggtgggcgcacaaagttcaatcgctcccgactgggtgtaccgaaagaacattgcctcgacgccctgtgtgtcggtgatgtcgactcggtggggcagtggcccgaccaccggctgacaattgccacgaccggtcgtgggctgcatcagcgtactcagccgaacaagtatggatttccgagatcctaccggactcgccggaaggtccattatgggttcattactggcgactttgtgcacgcaattgtcccgagagggaaaaacgctgggacacatgtgggccgagcagcggtgcgaaaatctggcagtttcgacatcaccacaactgctgggacccggcaggggatcaggtacaaatatgtgactctaatccagcgtggtgatggcttcaactactcaatcaacaaactgctaggccgaagtgaggttgccaggaccaatggcagtgcctactcctccctacgggtagagtcatcgactatctggcgcacctga

SEQ ID NO: 489 - DNA, 248 bp, Brevibacterium aurantiacum
gtcagcgacctcatggtgtacgagcgacgcctcgaaacggcgtccagcctcatcagttcgctgaccagaccaagacaccttgaaggaggtgactacgttgcacatacgacagaagaccgaccctgggatgcctcctcagtcccaggctctcgaatctgtgccagcagacaaggacggggtatctacgaaacggggcacagaagttgaaaccatttcagcaccgggtgttcaacatggtcgagaggaga

SEQ ID NO: 490 - DNA, 1278 bp, Unknown
  Ga0209594_1000294 JGI
atgagtaattttgtatttgttctcgattcaactaaaaaaccactcgacccctgtcatccagcagtcgctcgtaaactactaaataataaaaaggctgctatttttagacgctacccttttactattattttgtttaaaactgttgaagctcaaactcaaccagttgaactaaaattagacccaggtagcaaaacaacaggaattgctctagttagaaataatcaagtaatctgggcagcagagttaactcatagaggttctaaaattaaatctgatttagataatagaagggctattcgacgtagtagaagaaatagaaaaactaggtatagaaaacctagatttctaaatagaactaaagctcaaggctggctacctcctagtctagaacatagagtactaactactctaacttgggtgaaaagattaattaaattttgtcctattaattctattgctcaagaattagtacggtttgatactcaagttattcagaacccagaaatatctggagttcagtaccaacaaggaactttactaggttatgaaataagagaatatttactagaaaaatggcagaggaaatgtacctactgtcaaaaagaaaatattcctttacaaatagaatacgttgtaccaaaagctaaaggaggaacagatagaatctcaaatctatgtttagcctgcaaaccatgtaataacagaaaaggtacgaaaagtattgaggaatttctaaaaggaaagcctaatgttttacaaagagttaaaactcaacttaaaaccaccctaagagatgcagccgcagtaaattcaactagatggaaactatttaataacttaaaagaattaggattaccagtaagttgtggtagtggaggtttaaccaagtataacagaacaaaactgaacttagaaaaagcacattggattgatgcagcctgcgtgggcaaggttgagaatttagtaataaaaatcaatcaaccattattgataaaagcgtgtggttatggttcaagacaaatgaaaaatgtaaataagtatggttttccacgttcaaaagccaaacaaaagccttatggaaattggaaaactggagacatagttttactaataactaaaaaaggagaaaaatatgtgaacagattattagcaacgaataatcctagtgcatttgagataagagttgaaggtaagagaattaaagcaaaccccaaaagcaatttattaattaaggtatttgctaaagatggttactcttacacatttagagaagtttaa

SEQ ID NO: 491 - DNA, 252 bp, Unknown
  Ga0209594_1000294 JGI
aagcaaaaacctagctaaacattaacaaactttagcaaaccttcacttgcaccagctcactgtaaaaacagtaaacgttattaaggtcataacacctacagatacatgaagctagtttgtagctctgttgctattagttaaacaggtaagaagcttaggttttttaaaccagtgctattagcttaacaagccttaataactgagcatcaggatacttttacccgcaaggagttttcagtaatgagtaatttt

SEQ ID NO: 492 - DNA, 1347 bp, Unknown
  Ga0207997_1001251 JGI
atgggaaaccaacaacagaagttaggaaagagaaatacatacacacctacgaatttgcaagtttgtagctctgtggcgatgtctttaaacagagaggaaactctcagtgagcatggcttaaaaacctttcctaacaacctcgatgcaactcagcaacatcatacagttgtccagacaatatctggaattgtgtatgtaatgaatagagaaggaaaagcattgatgccaacaacatcaccgaaagcaagaaaactgttgaagaaaggattggcaaaggttgtgaaacgaaaaccttttgtgatacagctattagttccttgcaggaatgaaacgcagaaaatcatttgtaagattgatagtgggtataagaacatcggtttttcttgcacaacagacaagaaagaactattttgtggagaggttgttttggaaaacaaaacttcaaaacgattgacagacagaaagatgtatcgcaggtcaaaacgaaacaggctatggtatcgtaaaccacgattcaataatcggacaagaccagaagggtggttacccccaagcattgaacggaattatcagacacatctgagcctaatcaatagaattggtaatttgttgccgattacacgaaagattattgaggttggtaacttcgacatccagaaattagaaaacccagagattgaagggacagaatatcaacaaggaagtctatatagataccaaaatatgaaacattttgtattcagccgagaaaaaggtagatgtcagttatgtggtaaagatgcaaaagataagatggtattacatcatctaaagcaaaggaaagatgggggaactaacaaaccaaccaatattgcattattacatgagaaatgccatgataagttacacaaagaaggattaaatattaagttcacaaacaaggaatataagggagcaacctttatgaatatcatcaaatggagattcaagaaagatattgattgtctcttgacctttggctacaagacattttgtaatagattgaagttaggtttggagaaaacacattataatgatgcgttttgtatagaaaatacagataataatatcataagatgccttccaacaatattcaaacagaaacgagtgacaaacagatgttgtcagttgaataggaaaggttacaaaccaagcattagaagaacaacatataagattcagccgaaagattcagtatggattaaaggtaaagaatttattgtgaatggaatgatgaatcttggaaaaacaattttattatccaacaaaaaaactatttcaattaacaaaattgagaaatatttttcagtaggtggtttatatgtatga

SEQ ID NO: 493 - DNA, 281 bp, Unknown
  Ga0207997_1001251 JGI
gtcaatcacccctccctaaacccgaaaaggttttgaggaaggggcttgaatcgtgagatttgagagtaattggttgattagagggttgaaaaatgggaaaccaacaacagaagttaggaaagagaaatacatacacacctacgaatttgcaagtttgtagctctgtggcgatgtctttaaacagagaggaaactctcagtgagcatggcttaaaaacctttcctaacaacctcgatgcaactcagcaacatcatacagttgtccagacaatatctggaatt

SEQ ID NO: 494 - DNA, 1287 bp, Unknown
  Ga0193914_10090 JGI
atgcaaagagtatttgtcttagatcataataaacaaccgttgatgccttgccacccggcaagagcacgcaaactcttaaaaaagggaaaggctgctgtttaccgacgctaccctttcgcaattattatgacacaccgcgtaggtggtgatttgcaaacggtggaaattaaatttgacccaggtagccgcacaactggcatcgctttggttggggattttgaccgtggcaaagaagttatctgggctggcaacttaaaccatcgtgggcatcagataaaaagcaatctcaattcaagacgagcaatacgcagagcacggcgaaatagaaagactcgttatcgtcaggcacggtttaataaccgacggcggccaaaaggttggcttccaccatcattacggtcacgagttgataataccaagaattggatgcataagctggcacggttggcaccactcactcaaatagcagttgaaacggttaggtttgatactcagaaactgcaaaaaccggaaatatcgggggttgaatatcaacaaggcgagcttgccggctatgagttacgggaatatttgctagaaaaatggggtcgtgaatgtgcttattgtggtgccaaaaatataccgcttgaaattgaacacatccaagctcgtagcaaaggagggtccgatcgagtatccaacctaaccttagcttgcactccatgtaatatcgataagggcaataaggatattaaagagtttctttcgctaaagccgaaacgtttaaagaaaatccaagcgactgctacggcacctttaaaagatgcagcagcagtcaatgctacccgctacgcgactggcaatgtcctaaaatgtttcagtttaccgattactttctcaagtggtgggcgaaccaaatttaaccgtgtcaagctaggctacttaaaagaccattggattgacgcagcctgtgtcggcgaaagtggtagtcaagttgttattcctaaagcgataacacccctaattatcacatctaagggacgtgggtcaagacagaagtgtcgtatgaatcaatacggttttccgagaactggccctaaaaaacagaagcaggtcaagggttttcaaaccggcgatattgtaaaagccatcgtgactaaagggaaaaagataggcacgtatattgggcgtgttgtggtgcgatcccggggaagctttgatattggtagtggcgaaaagaaagtgggcagcatttcatataaatattgccaattgctccaaagggcagatggttacgagtacacataa

SEQ ID NO: 495 - DNA, 261 bp, Unknown
  Ga0193914_10090 JGI
aattataagctaagtaactgtccataaataacttagtcaactaagttattttaaagttacccgcctaagttcttcgagaactacgttagggatgaaaacataggtactctcgcgatgcttctccagtccgagactctacggggaactattaaacaggtccgatggaaaggccagtgtagtttccattcaaaaccgtcctataacattggctaggagactattacccgcgtcagcggagctaggtaacaatttatgcaaaga

SEQ ID NO: 496 - DNA, 1311 bp, Unknown
  Ga0223825_11034434 JGI
atgctagtatacgtacaggataaagagggcaaacctctaatgccgaccaaacggttcgggtgggttgcatattctctaaagcataagagggcgaaggtagtacggcgagagccttttaccattcgacttctttgcgatagtttccatcatcgtcaagaagttactcttggcgtcgatgttggaagcaagcacatcgggatgactgcatcaacagaaaagaaggaactatactctgcgcaagttgagatacgggatgatgtgtctaatctattgactgcccgtagggaaatgcggagggggagacgaggaagaaagcacaactggtataggcctgcgaggtgggcgaacagggcgaacgaagaaagaaatgcttctctcccgccgtctgtgaagcataaggctgattctcacatacgagcaatagagttcgtaagaaagattctgccagtaagcagattacgtgtggagattggaaagtttgatactcaaaagatacagaatccatcaatcaaaggagaagagtatcagcaaggcgcattggaaggatgggagaatttgaaatcctatgccaagtggcgggacgggaacaaatgccgagtgtgcggtgcaagtccatataaggacaagtccgtaaggttagaggtgcatcatatccgccgtagggcggatggcggtagcaattctccagacaatgtggtgactttgtgccacgaatgccacgaatcccatcaccagaagaagaaggtgttgaagtttaagagaccgcctatacacaaaaatgaggcacatatgaattccatgcgaaaatatctgattgataaacttgtgcataattcttggaagactccagtagagttcacctatgggtatgagactgcgatggcacggagggaacacaatgtcgagaaaagccacagaaacgattctttctgcatagcagggaattttaatgcacttctcaattcatataatgtctatcgtctgtatcagagaagaaggcataggaggaatctgcatgacaacacgattttgtctccaaagtcaatcaaggacaaaagtaagatgaccgctaaagaactaaagtgcggatataggagacctcaaaagatgagcggaaggattcgtggattctctctttgggatactgtcaagttcaacggagttatatatatagtatcgtcagtaaaagggtcagataacagagtgtgtcttagccgtagcgatgaggggaagacaattgtgaaagccatgagcaagtgcaagttgctctgccataacgggaacttggtaacagaaagagttggagcttga

SEQ ID NO: 497 - DNA, 340 bp, Unknown
  Ga0223825_11034434 JGI
catttacaacctagaacctgcaagaggctttatttcaactaattttttcgggaatccgcaaggatagttcaactaggagactagaaaggaaacgaaagaaacagaaaacctagtagaagttacagggaaatgcataggcaccggcgaatagttgtccaagtttgccgcactgcggatgtacattaaacagttctgtggtagaggaacagtgtgtgcatcgaacaaaggaaactctctgcaaccctccgatgggcaccaaacaccagaaggagtaatctgactggtgacttaccgagaaatcggttaacaaaaaaagtaagacacagaaaaaagaatgcta

SEQ ID NO: 498 - DNA, 1305 bp, Unknown
  Ga0116592_1000084 JGI
atgctcgtattcgtaattaatcagcatggtgaggcgctcatgccttgcccaacgcgaaaagcaagactattgctgaatgaaggaaaagcgaagattattggttatcagccattcagtatccagttattatatggatccagtggctacaaacagtcggttaaagtaggcacgaaaatcggggagaaacatatcggcattgcagttatatccgagggccgtgtactgatgaaaggtgaagtcgaattacggactgatgtgaaaagtctaatcgaaacacgtaaaatatacagacgcattcgtagacaacgaaaaacaagataccgaaaagcacgcttcctgaatcggaaaaagccaaaagggtggttgccaccgagtttggaaagtcgaaacgcaaacacttttcgttggattaatcgttttagtagtttgctacccaaccctacactacatatcgaaatcgccaagttcgaagtacataagctaatcattccaagcgtaggcaacgttgtccgtcaaatgggtcatagcgacggctattacaatacgcggtattatgtattcgcgagagacaactatatttgccaagtatgtaaaaagaaaaataaaatagtaaatgcgcatcatattctctacaggacacaaggtggaagcgatcgtgcggataacttgatcaccgtttgcaccgattgccatacgtttgacaatcatcggcccggcgagatcttttggcggtggatggaaggtgggaaaaaactgggggcctacaaagaaccaccttttacgaacagtttgcgaaaccgcgtttacgagcaatacccggatgcaatactctcatatgggagcgaaacgacgcctcatcgaaaattgattgggttagaaaagtcacttgtcaacgatgccatcgcgataacggggataccagctattatgaagataactgacaccaccttcatggtgaaacagttccgcaagaaaaagcgaagcctgcatgaagcgaccgcacgtaaaggacggaagcagccaaatactgaaagcagacgcaacgcaaagaataccaaggcgtccaaaggattctttttgaacgatgaagtgcgaacaccttgtggtaacatcggctacattagtggctttactggaaaaaacgcctgctacgtcaagtcaattaatggccagtatatcgttattccagagaaaacacataaacaacaatcgctcaagggactagtcaagagaagccatcaaggcaattggcgctaccaactcctacataatgaagaaggcgaacagttctacataaaggattaa

SEQ ID NO: 499 - DNA, 265 bp, Unknown
  Ga0116592_1000084 JGI
gtcaactacccaccactccaacattactagctgtcgaagtgggggcttgaaagagtctaagttgtctagccatagtcttttttgactacgttggttcggtgatcacaccctgggataatactctagtcccttgcactgtgtcggcgctgtaaaagctctgttgggtcggagcggtcaaccgaatttggcgacatttaatgtcggaagccttaccaacattggcgaagggtgacaaactccaaaaaggagggaatacgctatgctc

SEQ ID NO: 500 - DNA, 1227 bp, Unknown
  PROU1_101214 JGI
atgtcagtttatgttttaagtaaaaacggaaaaccgctaatgccgactaattcgggtaacgcaagattaatgcttagacaaggcaaggcaaaagtaattaaaagaacgccgtttactattcagctgacttatagcagtgataactataagcaggatgtagttttaggcatagataccggatataagaatgtaggcttatccgcagtatcggacaccaaagaattatttagctccgaaaccaagttgagaacagacatcgttaagctgttatccgaaaaaaggcaataccgcagaggaagacggaacaaactttggtatcgcaaggcaagattcttaaatcgtggtattaagaaaggctggcttgcgccgtcagttcagcataggcttgatagtcatattaagttagtcaatttcgttaagtctattttgcctatatcaagtattaatgttgaatccgccgcttttgatattcaaaagattaataatcctgaaatatcaggcgttgaatatcaaaacggagttcagaaagacttctggaacgtcagggaatatgtgttatacagggataatcataaatgccaaaattcaaaatacaagcatacggacaagatattaaatgttcatcacatcgtatcaaggcagacaggcggggatagacctgataatctgataaccttatgtgaaacttgccataaagcgtatcacaaaggcaagattaagttagagattaagaaacataaaggttttaaagccgaaactataatgtcaatattacgctggaaaatagttgataggttaagggaactcggtaataccgttaatattacctatggctatcttaccaagtccgcaagaatagtattaggattagacaagacacatagtaatgacgctttctgtatagcgggcggggataggcaggaaaaagttaatcaatcctattttatcaagtttgttcgtaaatgtaaccgttcgctgtttaaagctaaccttttaaaaggcggaaagcgtaaggttaacactattaagcaggctttcggcttccacaggtttgataatgttttatacggcaaaatggagtgctttattcacgggttgaggtcatctggctattttgatattagacttttaacgggagagaaaatcaatgattccgttaaatatagcaaattaaggttaatagaaacttttaaaacacggaggatagctctcctccccgccttatag

SEQ ID NO: 501 - DNA, 262 bp, Unknown
  PROU1_101214 JGI
gtcaaccacccgccgcttgaagaagcgggggcttgaaagagctggctgataagggagattaaattatgtttaatcagcagttatttaagagaaccgttaaggaacacaccttaagatattgcgcaagtcttaagctctgtggattagtattaaacagtcttgagagggtaaaagacagtgtgctaatcttaaaaaccttaaataacaatcccgatgcgtatctaacccttgtaaaaggaggtaaaacattatgtcagtttat

SEQ ID NO: 502 - DNA, 1485 bp, Unknown
  Ga0256407_10017433 JGI
atggcaaatatatacgttctatcaaaagacgggcagcctttaatgcctgtccacactttcggcagagtcagaaggctcttgaaaagcggcaaagctcgcattgtcgcacatattccgtttactatacagctgacctatgatatcaaagaacctgtgattgacgactgccttttagggatagaccctggcaggacaaatatcggcttatgcgtcatagacagcaaagccaacgtgcttttcgcatcagatgtagaaacaaggaacaaagcgatagcaaaactgatgctgaaaaggaagacagcacgacaggcgtcacgcaggggcgaaaggctccgcagacagagacgtgccataacggcagacaaaaccggcatggcaaagcatacagagttctggaggatgctcccgggctgcaaggagccggtgtgctgcaagatcataaggaataccgaagcccgcttcaataacagaaaacgtaaaaagggtgaactaaccactgccacggcaaaacacctattacaggcacatcttaaccttataaagaagacacaaaaactgttgcccctttcaggcatagtcatagagatcaataagttcgactttgcccgcatggagaaccctcaaataaggaactgggaataccagaaaggcaggctctttggattcagggatgtttatgacgccgtacaccaccggcaggaaggcaagtgccttctttgcgggaaagcagatatagaacattatcatcacttaacgccaaggcatcaggacggaagcaatactcttgataacatagccggattatgtaatggatgtcacagcaaagtgcatacagaccaaaaaacaaaagaggaattactctcaaagcatgaaggcatcaagaaaaaataccatgcactgtcagtgataaaccagataatgccggaacttttggggaaatgtgcagaaatccttcccacatacgtcactaccggggaagaaacaatgctgacaaggggttgcttcgcccttgaaaaagaccactatgtagacgcatggtgcatagcagcctctcggataacggaattttcggaagattacgatatccccgatttcaaaggcagtattcataatatcaggcagttccgccgtcacgacagagccattatcaaatcacagacagaaagaacatataagctggatggcaagatagtcgcaaagaaccgcaagccccgtttcgagcagcagggaccggcgctgtcagacttaaccctgacaaagcaggagatatcaagacttaaagtaaccaaaagcacgcgcaggtacaatattaaagacagactgatgcccggagcggcattcttacataacgggagctaccatataatgagcggtcaattaactaacgggcagtacctgagagcattaggagacggcaaaactaattacccaacaaggaaatgtaagatactcaaacacaatacaggattagtgtttatagcataa

SEQ ID NO: 503 - DNA, 261 bp, Unknown
  Ga0256407_10017433 JGI
gtcaactacccaccgcctacgctaacgctaagaggcgggggcttgtgaaaacaagcaatacacaagtattgtagttgagcagagaccaaagttgagtaagcttcacgcttacaagtccgacatgccacgttccatggggtgccactcccagccccatgtattcaaagggtatgccgagtctcgggagacctacggaccagcccaccgggtttgcagccattaaagggctaatctttaagaaaggacaggattatggcaaat

SEQ ID NO: 504 - DNA, 1134 bp, Unknown
  Ga0190346_1003230 JGI
atgcaaagagtatttattctggatcataacaaaaagccgttgatgccctgccatcccgcaagagcacgcaaactcttaaaaaacggaaaggctgctgtttatcgtcgttatcctttcataattattatgaagtgccgtgtaggtggtgatttgcagcctatcgagatcaaatttgatcccggtagccgcacaactgggatcgctttggttgggcattttgatcgtggcccagaggtgatctgggcgggcaacctaaaccatcgtggacatcagataaaaagaaatcttgattcaagacgggcggtacgtcgttctcgaagaaatagaaaaactcgttatcgcccagcacgttttaataaccgacagcggcccaaaagctggcttcccccctcattgaggtcacgagttgataacgtaaagaattggatgattaagttgtcgcgattagcaccactcactcaaatagcagttgaaacggttaggttcgatactcagaaaatacaaaatcccgaaatatcgggggttgaatatcaacaaggcgagcttgctggctatgagttgcgggaatatttgctagaaaaatgggatcgtgaatgtgcctattgtggtgctaaaaatgtaccgcttgaaattgagcacattcaagctcgtagcaaaggagggtcagatcgagtatccaacctaaccttagcttgcactccatgtaaccaaaaaaaaggcaacaaggacattaaggaatttctaaaacgcaaacctaagcgtttgaagaaaattcaagcacaagcgaaggtacccttaaaagacgctgcggcagtcaatgctactcgctacgctactggcaatgttctaaaagatttcggtttaccaatcactttctcaactggtgggcgaaccaaatttaaccgtacaacgcgcggctatccaaaagcccattggatagacgcggcttgtgtaggggaaagtggtgctaaagtcgttattcccccagcgataacgcctttgattatcactgccaaaggacgtggctcaaggcaaaagtgcagtatgaatcaatatggatttccgagaaccagccccaaaaaacacaagcgagtaaaagggtttcaaacgggtgacattgttaaagcggtcgtg

SEQ ID NO: 505 - DNA, 264 bp, Unknown
  Ga0190346_1003230 JGI
aactacagactcttataagtaaccgtccataaataacttaggcaactaagtattttaaggttacccgctttagttcttcggaactacgttagggacgaaaatataggtactcttgtgatgcttctccagtccgagattctacggggagtcattaaacaagtctgatggaaaggctagtgtggctcccattcaaaaccgtcctataacattagctaggagaccattaccagtgcaaactgagttaggtgacaatttatgcaaaga

SEQ ID NO: 506 - DNA, 1257 bp, Moorea sp. SIO4A5
atgcagaattacgtattcgttattgacacaaacaagcaaccattaaaccctattccaccaaagaaagctcgccggttattaaacaaaggtaaggctgccgtttttaggatgtacccgttcacaatcatcttaaagactgcgatcaataatccaaccatctcaccttgtcaaataaagattgaccctggtagtaaggtaactggatttgccctagtccaaaacaaccaagttatttggggaatggaattagagcacagaggaggattaattaagaaaaaactagagtctagaagcgctgtaaggcgtaggagacgtaaccgcaacacccgctacaggaaacccagattccttaaccgtaagcgtccagagggatggcttccacctagtctagaacacaggattttgactattcagacttgggtaaaacgattgattaaattctgcccagtcaatgagatttgggtcgaaagggttaagtttgacacccaaaaaatgcaaaatcctgaaatcagtggcattcagtaccagcaaggagagttagccggatatgaggttagagagtacttacttgaaaaatggggaagagaatgcacttactgtggtaagcaatccgttccattgcaaatcgaacacattcacccaaggtcacttggtggaagcgatcgcgtaagtaatctttgtttggcttgtaaaaagtgtaatcaacgcaaaggtaacaagcctatagaagacttcttaaaaaagaagccaagtctactgcaaaaaatcaaatctaaagctaagcagccattaaaagatgcaacagcagtaaatgcaactcggaacaagttagttaaggtacttcaattaatcaaggttgtggtcaccggaacgggagcgcaaaccaaatacaaccggactagattagaactacctaagcagcactggattgatgccgcttgtgttggggatattgagaccttagtgttgagaacctctcagccgctgttagtcacttgcaagggacccggagggagacagaaagcagcacttaacaaatacggttaccccatcagacacaatccattaaaaccaatcaaaggctgggttactggggacatagcccagcatcctctactaggaataggcaaagtcacccctagaagcaaaggaagctttggatttaccccgttaggaaccaagggctacaaaagttgcaaacctcaagatatatcggcaatataccgaaaagatggatacacttatagcttttgctag

SEQ ID NO: 507 - DNA, 230 bp, Moorea sp. SIO4A5
cgttaaagcctggcaattcccggtaaactctgggattgcctagcgaagatgcagactaaggattagtttcctacgttggtctggtcaggatacccgagggtgacctccagctcccggctctatcgctaactattaagaaaaggcaaaatgtgtggttagcatgacaagccattccaacattgtcgaggaacacattaccgaattgagttgcactaatcatgcagaattac

SEQ ID NO: 508 - DNA, 1212 bp, Unknown
  Ga0207747_1000200 JGI
atgcctacaacaccaagtaaagcgagaaaattattaaaacaaggtaaggcaaaagtagtaaaaagagaaccatttacaattcaattattatacgcaactggtgaaaccaagcaggatataacattaggtatagatgcaggaagtaaatttattggagtatctgctacaacagaaaagcaagagctattttcagcagaagtagaattaagaaacgatattgtagacttactatctacacgtagagaattcagacgtacaagaaggaatagattaaggtatagaaaacccagatttttaaatcgtgtttatagtaaaaataaaggttggttagcaccttctgttgaaaataaaatacaaacacatttaaaaataacaagtaagatacacgaaattttgcctatatcaaaaataataatagaagttgcttcctttgatatacaaaagattaaaaatcccgatatagaaggtgaacaataccaacaaggagaacaattgggattttggaatgtaagagaatatgtcctttggagagatggatataaatgtcaaggtaaaaagggttgcaaaaataaaatattaaatgtacatcatatagaatcaaggaaaactggtggaaattccccaagcaaccttattactttgtgtgaaagttgccataaagattatcatgctggtaaattaaaattaaatttaaaacgcggtcaatcgtttaaagatgcagcttttatggggattatgaggtggacattttataatagactcaaagaaatatattctaatgtaaaaataacttatggatatattactaaaaacactagaatacagaataatctaccaaaagaacataggattgatgcattatgtataagtggtaatcctaatgttaaaagattagattattggtattatattaagcaagtaagaaggcacaatagacaaattcataaagccaatatattaaagggcgacaaaaagaaattaaatcaagctccttatttagtaaaaggattcagattgtttgacaaggtaaaatacaaaggacaagaatgttttatattcggtagacgcagttctggttattttgatttaagaaaacttgatggtacagttattcataggagtgccaattgtaaagatttaaaacttataagcaaggcaaaaacattattatgggaaaggaggatagatgtggctgtttcctcacatgactaa

SEQ ID NO: 509 - DNA, 228 bp, Unknown
  Ga0207747_1000200 JGI
gtcaataacccaccactaaagtggcgggcttgcaaaagcctttattgactagactaagcgaaagctacgttacctatatcataacacctacgaatgtttaccctagttcgtagctctgttgcttaactttaaacagttctgatgggtaggaacagtgagttaagtgtaaaaagtataggtaacattgtctaagggtactaactccagaaaggaggacataacttgaga

SEQ ID NO: 510 - DNA, 1242 bp, Unknown
  Ga0315268_10018380 JGI
atgccgtgctcgccggccaaagcggggttcctgctccggcggggaaaagccgaggtcgtgaagagaaccccctttgtgatccggctgaagtacggaagcggggggtaccggcaaccggtgaccgcggggctggacagcgggtacctgaatgtcggggtgtccgtagttgcgggtgggaaagagctccacgcggaagaggtggtgttgagatccgacatcgttgtactgaacagcgaaagaaggcagcaccggcgcaaccgaaggaacaggaaaacctggtaccgccaaccgcggttcctgaaccgcaagaaaccggaaggttggctggcgccttccctccagcacaagctggacagccaggtgaagctggtggtcgggttggccaaggtagtaccggtcacgaaggtagtggtggaagtcgccagcttcgacatccagaagatcaaaaaccccgagatcgcgggagtcgggtaccagcagggcgagcaggccgggtttgccaacgtgagggagtacgttctctaccgggacgggcacaggtgcaggtgctgcaacggcaggtcaaaagacgagcggttggaagttcaccaccgggagagcagaaaaaccggaggcaatcgaccggagaatctggtgacgctctgcgagacctgtcacgaccgggctacggccggagaggatcttgggtttggaaaaactcctcttgggttcaaggcggagaccttcatgacaacggtccgatggaagctgatggcccggctccgggagtgggggtttgaggttgctcacaccttcggctacatcaccaagatgcgaagggaagaagcgcggatcgagaaaactcacgccaacgatgcgttcgtcatcgccggagggaccggggaatacgagaggcagagggtgatcctgctgaaaatgcaggtccggaagtgcaaccggaagctgttcaagggcgaccggagccacctcaggaacacggcgcctcggctggtcaaggggttcgcccggttcgacaaggtccgatacagggggatcgagtgttttgtgtccggcaggagaagcaccggatatttcgacctgcggaagctggatgggacccgagtccatgcaagcgcgaagtgggcagatctgagactgctggaacggggaggaacgatgccgtcgggatacaagcaagccaggagaggggccgcgcattcctccccaggggcaagccccggggtctcctgcgcgatgctatga

SEQ ID NO: 511 - DNA, 274 bp, Unknown
  Ga0315268_10018380 JGI
gtcaattaccctcgggacgagcccgggggcttgcgggaagcaacggcaacacccgcagacctcgattgactagggggccgggtggaaacacccggcagcagttgcttcggtcagcacaccccgggatattccgcacgtcccgggccctgtggtccacggttaaaagggtttcaggggtaaaacccggtgccgtagacatgacaagccgaggcaacaatcccgatgcggcaccaaccccctgaaacggggagaaggagactgcttgttagtcttc

SEQ ID NO: 512 - DNA, 1377 bp, Unknown
  Ga0209317_1000713 JGI
atggcagttttcgtgatcgacaaaagaaaagatccactcatgccttgttcagagaaaagggcgagacttctgctggaaaagggtaaggcagttattcaccgtcgaattccttttactatcaggttgaaggaccgcattgctggtgaagtacagccgctttgcgtcaaggtcgatccaggcagcaagactacgggattggcggtgactaccgagtatggcaaggttgtttttgcagcagagatacagcatcgagggcaacaagccagagaagcactgcaaggacggaaaggattcaggaaaggccgtcgcagccgtaatcttcgctaccgggcaccgcggttcgacaaccgaaccagactaaagggttggctaccgccatcgttggagagcagaatcggcaacatcgtcacatgggcggagagattacgcaaactcgcgccagtgacatctctgtcacaggagttggttcgcttcgatttacagcagatggagaatccggagatttccggcatcgagtaccagcaaggcactttggccggatacgaagtacgcgaatatcttcttgaaaagtggggccgtaagtgtgcctattgcgacgcggaaaacacacccttgcagttcgaccacatacatgcaaaggccagcggtggtagcaaccgaatcagcaacctcactttggcctgcgggccgtgcaatcagaaaaaggactcgcttgatattgaggttttcctgaagtcaaaaccgaaaatactcaaacgtatacttgcccaggcaaaacgaccgctcaaggatgctgccgctgtaaacgcgacacgatgggaattgtataacaggctcaccgcaactggccttccagtcgaaatcgggtctggggggcggacgaaattcaacagaacccagcagcatcttccgaaaagtcactggatcgacgccgcttgtgtaggtctctctggcgaacaggttgttatgccagcaggagtatgcgtttttggaattaaggccatgggacgcggatcgtatcagaggacccgggtgaatgcctccggttttcctcgcgggtatctatccaggcaaaagcagtatttaggtttccaaactggtgacattgtaatcgcggacgtacccaaagggaaaaagtctggtgtccatgccggcagagttgctatccgtatgtctggatctttcaacattcagactgctgatggggtcgtccaaggaatcagtcatcgccactgccgcgtaatccagcgtggcgatggttataactactcgacaacgctgatagcaaaccataaaggagagcgggcaaagggtcatgctttgcacgacgcgctatccctccccggcctgaacgccggggtttcccgcgcagcttga

SEQ ID NO: 513 - DNA, 294 bp, Unknown
  Ga0209317_1000713 JGI
gtcaactaccccggcctgaaggccgaggcttgtgagagattacaagcttgaggttgaccagggggagccgtaaccaaccggctacgttgtatggaggttcaagaccgacggcagaatgcttcctcagttctgcccaatcgaagtcccggttgcagacacgccacgggtaggcccgaaacgggtcgggacatatcgccgccatacaacatccccgaggggagatttcccgcaagggaagcgtcacaaggcccgtaagggcgttttgaaaagaagcttcaaaaggatcaaatggca

SEQ ID NO: 514 - DNA, 1215 bp, Unknown
  Ga0373927_0000546 JGI
gtgcgagacggcgagcgcaccgctcaagctcctgactaccaggccgatctgcggcagaagcgctataggacaacaagaacgttcgcgtgccaccctgttcggacgacatctcgccacgcgcagcagacgagagggaggcacacctctctcagccctcagtgccatcgggaagagttctatgacccgggcatgggcctggagaaagggagatccctaatcatacgcataccagtcggagacgcacggggagtagctctcataccctgtacacctgccaaagctcgccacctcttgatgtgtggcaacgcccggtggcctggtgtactctccgtgcaagtgtacaacgaacaggagcccactaaccaaccgttggtggcaggtgtggatgcaggcaggacgtctgagggcgaccgtgtggttggcagcatagacacggcgctcaaccttctgggagaggcccgcgatcacatccgggaggccgtggaaatatgcagaacgctgcgacgagctatgtgccgactcacacgtcggcggaaaaccagagcccgcatccggcccgtgagggaaggtgtgcccgctgtgacacgaccgagcaaaggtggccagtgccatggcgcctttcgcccggttcaggtgggcaaggagcacttctccggccttctgcgtgcgaggggacgcatggtgtatctcaaggaaggctggcagaccagagaactgcatgaaaggtatggcttgcagaggccgaaacgggagagcctgcaattttttgagtatcatgcgatagacgcccgggtcctggcagccagcagcatccgtgggacatgtgttccgactagcgcgcatccccgccaacagcatcgtttgcacgcagcccggggtggtctgcgcaaaccctctgacgggaggcatgtgcctggactcaaacgtggcacgcttgtttgtcattccgggtatgggttctgtgcggtgggtggttttggccagagagcgtccattatcagcgtgcatgcgtgttggacgaacgcacgacggacgcgaggagcacgaggcaacgattgtcggcccttgacccgggtggcgtgtcgctcccgactcgtcggtgtgatcccaaagaagcgaggcaagggaggccacccgactcctgccccatctcagaaacgcctgttttttcccactgcgggaacgctggtgggcccgcacaggcgggaggtttga

SEQ ID NO: 515 - DNA, 296 bp, Unknown
  Ga0373927_0000546 JGI
acgaacacaaaccgtctgtgttcttgcattcgatgatcggtcactgcgggccagaacgtgtgatctctgcaaaacgtctctggtcgctgctggcccttcgacgaatatactgtatcaacgtaaggcaggtccatttttccaggctattatactgcagtgtctgcaaactggcaagcgccgaagtaccgcgtccctctcctctagccctgccacagactggctgtgctggcaggtatacccggcggccagcagaagtgggggtggtgttgctccctggcgagatatgctatataata

SEQ ID NO: 516 - DNA, 1437 bp, Unknown
  Ga0136449_100279210 JGI
gtgcttcctcagccccggacccttgaagcgccgtcagcagacaaccccaggggtgggcacgaaacggggcggcacggccgtaaggcacccggcttcccggaaggggcgcgagcgcaacatggccgagaggagaccagccggaaggctggcgtcacccccgcaaggggagaccgccgagtgtttgtactcgacaagcggggtaacccgctcatgccctgtcatccgtcccgcgcccgcgcgctgctgcgttcgggccgggcggcggttcacaggcacacgccgttcgtcatccggctgaaggaccgtgacggcggcgatgttcagcaggtccgcctcggcgtggatccgggctcaaagaccaccgggatggcgcttacccgccaggacggcgacgcgacccgggaagtcctcgtactactggaggtcacccatcagtcggtcctgatccgcaaaaggatccaacaacgcgccgcgagccgccgacgtcgccgatcagccaacctccgctaccgcgcgccgaggtttagtaatcgcaccaagccgagcgggtggctggccccgtcgttgcgatcccgcgtgcagcatgttgagacatgggcgcgacgactccagcgctggtgccctatcgctgcgatcgacctggaactagtccggttcgatacccaggccatggagaagcccgagatcgcgggaacggaatatcagcagggcaccctcgccggatatgaggcccgtgagtacctgctagagaagtgggagcgcaggtgcgcttattgcgatgcgcaaaatgttcctctcaacatcgaccacatcgtgccccgctcgcgcggcggcagtgatcgcgtctccaacctcacgcttgcttgtatcccgtgcaaccaagccaagggctccatgccggtgcgccggttcgtcgcggatccggaccggctggcgcggatcctcgcacaggcaagggtttcgctacgggacgccgcagcggtgaactcgaccagattcgcctgtctcgccgcgctacgcggcctaggggtccccgtcgaatgctggtccggtggccgcaccaagtggaaccgccgtcggaccgggacaccgaaaactcatgctcttgacgccgcttgctgcggcgaggtgagccagctgaaaggaacctctgcgcctgtctacgtggtcaaagcggccggtcgaggattgcatcgacggacgtgtccagatgcctacggattccctcggctgcgcatgccgcgagtcaagcaggtgtacggattccagaccggagacctagtgcgggcacacgttcctaacgggagatatgccgggatgcatctcggtcgcgtcagcgtccgaagcagagggcagttccgcatcggcggcagggacatcaactacaggaattgcatgctaatccagcgagcggacggatatgaccatgccatttag

SEQ ID NO: 517 - DNA, 297 bp, Unknown
  Ga0136449_100279210 JGI
gcctggctccgctcccctgagggtgaggagtaaccgatccccaatgttctacatcggttaccaggccaagtcgctaaggaggtgactacgttgcaggcaggacagaagaccgactccggggtgcttcctcagccccggacccttgaagcgccgtcagcagacaaccccaggggtgggcacgaaacggggcggcacggccgtaaggcacccggcttcccggaaggggcgcgagcgcaacatggccgagaggagaccagccggaaggctggcgtcacccccgcaaggggagaccgccga

SEQ ID NO: 518 - DNA, 1377 bp, Unknown
  Ga0213873_10000897 JGI
atgcaagttttcgtcctggacaccggccgcaagccgctcgatccgtgctcgccggcgcgggcccggatcctgctggccaaggggcgggccgcggtcttccggcgctaccccttcacgatcatcctgcacgatcggaaggttgaggattcggtcgtgcacgagcatcgggtcaagatcgacccgggttccaagacgaccggcatcgcggtcgtgcaggaggccacgggcgcggtcgtcgctgcggtcgaagtcgagcaccggggccaggcgatcaaggcgttgctgcgcgatcgcaaggccctccgccgcaatcgacgggcccgcaagacgcgctatcgccggccccggagcaaggccgaggccgcgaaccaagaggcgcagaagaaggccaagggttggctccctccgagtttgctgagccggatcgccaacgtcctgacctgggtcgctcggctccggcgcctggtcccggtcgcggcgatctcgcaagagttggtccggttcgacctccagaagcacgaggatcccgagatctccggcatcgcgtaccagcaaggcacgctggccggctacgagttgcgggagtacctcttggagaagttcgaccgcacgtgcgcgtattgcggcaggaccgacgtaccgctccaggtcgaacacatcgtaccgcggagcaagggcggatccgaccgggtcagcaacctcacgctggcctgcgagccgtgcaaccgccgcaagggaaaccgacccgtcgaggactttctgaagagcaagcttgaggtcctggccaagatcctgaagcgagccaaggccccgctcaaggacgccacggccgtcaacgcgacacgctgggagctgtaccgccggctccgggcgacgggcttgcccgtcgagtgcggctcgggcggccggacgaagttcaaccgcgcgacgcgcggcctgcccaagacacactggctcgacgccgcatgcgtcggggccagcacgcccgaggtgctcgacgtcgaaggtttgcggccgttgctggtccaggcgtgcgggcacggcacgcgacagcggcagaagttggataagttcgggtcgccaaggggtaacccggcccagaggaacaagcacgcttacgggttccggaccggggatatcgtgcgtgccgacatcccccatggaaagcacagcgggatacacacggggcgaatccagatccggaatcgaccgtcattcctgctaggaaaggccgacgtgcatcccaagtatctcacgatcatccacgacgccgacggatacgcgtattcgctcggcgagaccatcgttatccgggccgagcccggaccggatttgctcccccccacggctaaagccggggggccccgcaaatcctga

SEQ ID NO: 519 - DNA, 281 bp, Unknown
  Ga0213873_10000897 JGI
gtgaagttccccacccgtcaacggaccccagccctaaagggcggggcttggtgttgcaagacgccaagcacggtgaacaggctcagccctagcaatagggctacgttggaaggtgacgacagacgggatgcgaagccagtctccgatcctgtcgcccgcgattaaaagtccgaaggtctaggacggtgtcgcgggccgtagggatgcagaagccgaccaacattgccgaggcgaacgttactgcgaaagcaaggacctcgtaagaggcaatctacatgcaa

SEQ ID NO: 520 - DNA, 1404 bp, Unknown
  Ga0070717_10012599 JGI
atgtcacatgtgtttctcctggacgctgagcggcgtccgcttgctccggtgcacccgggacgggcacggctcttactcaaagcaggcaaggctgccgtcttcaagcgcttccccttcaccctgattctcagacagctcgcagcgcaagccgcccgtgagccgctgcgtttgaagatcgacccgggcagtcacaccactggtctggcgctggtagcagagaggagtggcgaggtgctgtgggcaggggagctcacccatcaaggggaggcgatcgtcgagcgcctgcggaagcggcgagcggtgcgcagagggcgccgacagcgccatacacgctaccgagaggcgcgctttgccaaccggcgcaggaaagacggctggctgcctccgtcgctgcgcagccgggtgcaaaacgtgctgacctgggtccagcgcttgcggcggctctgtccgatcgcggcgctctcgctggagttggtgcggttcgacacgcaggccatacaggacccggacatcgcgggagtcgtgtaccaacagggcacgctggccggctttgaggtcaaggagtatgtgttggagaagtggggcaggcgctgcgcgtactgcgatgcgagcggcgtgccgctggagatcgagcatatcatgccgcgcagccgtggggggagcagccgcgagagtaatctgacgctctcctgtgtgccctgtaacacggccaaggggacacaggacattggcgtgttcctggcccacgaccccgagcgactcgcgcgcatcctggcgcaggcgaaggcgccgctgcgtgacgtggcggcggtcaatgcgacgcggtgggcgctctatgaacggctcgtagccttagggctgtccgtcgaggtgggcagcggcgggcgtaccaaatacaaccgcaacaggcaacagatgcccaagacgcattggacggatgccgcctgcgtgggggagagcacgcccgagcagttgcggaactggcagaccgtccgacccttgctgattactgccaccgggaggcaaagccgtcagatgtgccacgtggataagcgcggctttccgcgtggtaagcccaaggggccgagccggtcacacgggttccggaccggggatatggtgcgagccgtggtcaccaaaggcgtacacatgggcacctacgtggggcgggtggccatcaagtccgatggctacttcaagctcacgaccagggccagggtggtggagggcatccatgcccgctattgcaccccactgcatcgtagcgatggctatgggtacgccattgggagtctagcagcgcttcctccccaggtctcaaggaccggggctccgcgctgctttgaggggaaggggcaccggaatcgtcaagcatccatcccttcgcaagggatgggctcgtga

SEQ ID NO: 521 - DNA, 315 bp, Unknown
  Ga0070717_10012599 JGI
gtcagcgaccccacggggaaacccgggggcatgtgcttgagaaagagcatgccctgatgctgaccagctcccctgggtgctcttgctgagagggcagccagggagccgttcgttgggagcgccaccagtcggaccctgggatggcctttccagtcccaggcgctgcaatcctgctgttaaacaggtgcacggggaagcagagccggtgcagcgggaagagggccgccaacgaacaggagcgaggaaaacttcacccgcgcaagcggaggccccaagcgggccagaccacgaaaggaagcagtagatatgtcacat

SEQ ID NO: 522 - DNA, 1329 bp, Unknown
  Ga0163147_10008687 JGI
atgcaacgagtattggtgctagataagagcaaaaacccgctgatgccgtgtcatcccgcacgcgcacatcaactgctcaagcaagggaaggcggcggtctttcgtcaatatcccttcaccatcattttgaaagaacgggatggtggggatgttcaacccgtcactatcaaggtagacccgggcagtaagaccactgggataccgatggtcgctgatttcagagcgggtaagcgtgtgatttgggctgggaagctcacccatcgcgggcagcaaatccgagataggttgttatcgcaccgtcaaataaggcggggtcggcgtgtccgtaagacacgctatcgcttggctcgtttcctaaatcggcgtcgtgtgggaagcaaacttgcgccatcgttacaaagtcgagtcgagaacacactaacttgggtcgggcgtctgagtcgttggtcgcctattaactcgatctcaatggagcttgtgcgctttgatatgcagttgatggaaaatgctgaaatatctggcgtggaataccaacagggcgaacttgctggttatgaggttcgagaatatctactggaaaagtggggacgcgagtgcgcctattgtcatgccgccgataggccattagaaatcgaacatatcaccccaaaatcacgcggtggctcaaatcgtgtgagtaatcttaccgtggcttgccatgactgtaatcaacgtaagggtagccaaactgcgacagaatttgggcacgccaatatccaacagcaagccaagcaaccgctcaaagatgcggcggcggttaacgcgactcgctgggcgttgtggagacgcatggacacattgggtttgccattggaagtcgggacagggggacgcacgaaatttaatcgggtaaaacaggactatccaaaagcgcattggattgacgcggcttgtgtaggagaaagtggagaacaaatttacaccagcctaaatcatgcgccacttcagatgaagacgacagggcatcaatcgcggcaaatgtgccgcgttgataagtacggcttcccaagaaccagcgccaaacaagggcgtgtccactttggtttccaaacaggggatatagtcagggcaatggtcacaaaaggagtaaaacgcggtatgtatgttgggagagttagtgtcagggctagtggtttttttaatatcactacccctaccggaacgattcagggtatcagctatcgctacttcaccccaattcacaaatccgatggctatctttacgagaaaggagaggcgctttcccccgctaccacaagggtagcggtacccccgcgccaagttcaatga

SEQ ID NO: 523 - DNA, 255 bp, Unknown
  Ga0163147_10008687 JGI
gtcaacgaccacccctatgaagggggtggcttgcgataagcaagcccatgttgaccagccttagtctcattcgtgagacaccgttattcgggtcacgataccggcgggtgagtgaaccagcccgtcgctctatcgttcaccgttaaacatgccgagggtctaggcaagtgcggtgggcatgacaagcccgaataccattggcgaggttcactttaccgccgcaaggcgagaataatgaggtaactcatgcaacga

SEQ ID NO: 524 - DNA, 1065 bp, Euryarchaeota archaeon
ttgtgttacttaactgggaaatatacacaagatatagagcttggcatagatgcagggtattcagccatagggttcagtgcaacaacagacaaaagggaattaatttcaggtgagttaattttgagaaagagaatttccaaactcattgagcagaaaagaaattacagaaaaggtaggcgaaataagttatggcacagaaaattaagatttaataatcgtagcaaacctgaaggttggtttgcacccagtattcagcataaacttgagacacatctcagattgatagaaaaactgaagaagatactacccataacaaaaatcaccatagaggtggcaaagtttgaccagcagaagatgaacaaaacagagattaagggtgtagaataccggcagggcgagttacagggctatgaagtgagagaatatctgctggagaagtggaaacataaatgtgcttattgtggtaagaataatcttcctctggaaattgaacatataatccctaaaatcagaggaggaacaaacagagtttccaatttaaccatagcgtgtcacaaatgtaatcagaagaaaggagacaagacagcagcagagttcggatatccagaaatacagaagaaagcaaagcaaacattaaaagcaactgcatttatgaatatcgtcagatggagactggtgaatactctggagtgtggctggacgtatggatatatcaccaagcatgacaggattaaattaggattagagaagagccatgtgaatgatgcttttgttattgctggtggaacaacacagagcagaagtaaactgtatatggcaacacaaaccagaaggaataacagaagtattcaaaccaatagggtgggtttcaaaccctctatcagacgacagagatatgaattacagcccaatgacttagtgaaatataagaaaatactgtgtaaagtcaaaggagggttcagttatggtaaatgggtcagattggtaaccaaagcaggtaaaattattaacaccaatgttaagaaagtggaattggtaaaatatggaaaaggaatacagttttaa

SEQ ID NO: 525 - DNA, 253 bp, Euryarchaeota archaeon
gtcagtcacccacggctaaagcacgtgggcttgttctgtgaggagcaagagcaattggttgattaggaggcattgaatatgcagaagttattggtagagtttcagaacacaccagaggatgctcctcaagtcctctgctctgtaagtgaggtattaaacagagacaaaagtctcagtgtgcctcgcacagtactggctaataacaactccgctcaggaccaacactctggcaagagtggacaggtgttaagcg

SEQ ID NO: 526 - DNA, 1248 bp, Unknown
  Ga0256404_1016703 JGI
atggtttatgtagtttcaaagagtggaaaacctctgatgccaaccgagagatacggtaaagttcggaggatgttaaagaatggcgaggctatcgttattaaacgtgtgccattcaccattcagttacaatatgattcaaaggaatacactcaagacttaactcttggtgttgatgcgggtagtaaaaaggttggattatctgtgtcttctaaggaaaaagaagtctttgctggggagttggcactaagaaatgatattgtaaatctcttgtctacaagaagagaatcacgaaaaacaaggcgaaatcataagacgagataccgtaaggcaagatttgacaatcgcaaaaagccaaaaggatggctggcaccatctgttcaaaataagattaacagtcatttaaaaatagtgggtgatcttaaaaagattcttccaatatccaagattgttgttgaggttgcaagttttgacacacaaagacttaaagcagatattgaaggtctgcaaacaccacaaagtattgactatcagcatggtgaacagtttggtttctggaatgtgagagaatatatcctttatcgtgataatcatacatgtcagtgttgcaaaggaaaatctggtgacaaagttttaaatgttcatcatattgaatctcgtaagactggtggtaattcccctggcaatctaattacactttgcgaatattgtcacaagaaataccacgaaggaaaagtcaaacttccagatgcgattaaacgtaaagcttctatgcgagacgccgcttttatgggaatcatgcgatgggcgctctacaataagctcaaagaaatgtatcatggagaagtgtcaatgacttatggatatattacaaagcatacacgcatccaaaatggtattcaaaaaacacatgcggctgacgctctgtgtattgcaggacatcccaaagctataagagcatatgagttttataacataagaaagataaggtgccataatcgtcagatacacaaaatggcaatctcaaaaggcggagttagaaaaaggaatcaagcgccatatcttgttaaaggatttagattgtttgatcgtgttttgtttgatagtcaagagtgttttatctttgggcgtagaagtagtggttattttgatttgcgtaagcttaacggagagaaagtgagtccatgtgcttcgtacaaaaagatattgttactttcaaaagctaaaaaatatttatgggaaaggatgtga

SEQ ID NO: 527 - DNA, 257 bp, Unknown
  Ga0256404_1016703 JGI
gtcaatgactcacgattaaaatcgtgagcttgcggttttaattgtcgtgcaaacgaatgttgactagcctaagcaccacgagtgctacgttgttttggtcataacacctacgaatatcatacctagtttgtagctctgttgttggtgattaaaagtcctgtggagtagggacggtgttaccagcatgacaagccattacaacattggcgaaggtatataacggtcttgagaccgatttatctgaaaggatattaatg

SEQ ID NO: 528 - DNA, 1215 bp, Unknown
  Ga0247608_10002393 JGI
atggtgagacgtatgctcaagtccggaaatgccgttgtagtttgtcttgagccgttcaccatacggctgtgctatgaaacgactggatacatccagccgtgtactctcggaatagacccaggtgcaaagcacgtgggtataagcgttactacagagaagaaagaactgttaaaagtacaagtagatttaaggacagacatcaaaaaacgacttgatgagagaagagaatacaggaatatgagacgatatctgctgagatatcgtcaagcaagattcaacaacagagtttctgtaaagaaagagggatggattccgccgtcactgatgagcaggaattctgctcatctcagaatactcaaatttatttccaagatagttccgtttgactgcatcagatttgaatactgtccgtttgatacaagacagatgagagaccctgatgtacagggttctgactatcaacattcagaaaaagaagactttgataacacaaagtctttcgtgaagcacagagatggtttcaagtgtcaggtgtgtcacggaaagtctggtgataccagacttgaagtccatcatcttactccagtgtcaaaaggaggcagcaatcatccggataatctggctacagtgtgtcacaaatgtcacactgagatacatcaggataaagtcaagttgaagatcaccaagaaaacattacagaaaaagaatgtaaaattgcttagggatgctgctgtaatgaatgtcattaaagacattcttgtcaagatgataagacaggaattcccagatagggaattccatatcacatacggttacaagacagcaagactgagaagagaacacaacattgacaagtcacactgctttgatgcatatgtcatagcaaggaatcttgaagcagaatcagcaaatactatgtactacggaagagtcttccgtaggcataacagacagaaattcaaggcaaacagaatcaagcacggaattctgaagaagtcaaagacagaatacaagttgttcggattctgtctgtgggacagaatcctttatgacaaccaaatatgttatattggaggaagaagagattctggatacttcaagataacttccattgatgggaagttaatcaaagacggagttaattattcaagattaaaatatacaagtcattccaaaggactgacttttgagaaaataaaatataataacaattaa

SEQ ID NO: 529 - DNA, 332 bp, Unknown
  Ga0247608_10002393 JGI
gtcaatgaccggctggtctcgtcactggtgtgacagaggaccagcggcttgtttagacagcaacgtccggcaagccgacgttgatagagcctgaggccggatatcatccggactatgttactctgaaatacataggcaccaagggatgcatatcccagtcctttgctctgcgcactgtgattaaacagtcctgtccggtagggacagtgttgcagtgatataaaactcagagataacattggtcaggggtaactaacagacagcaatgctgtctgacttacagtgaataactgttataattaaaaaattgaaagaaacaaatacagatggta

SEQ ID NO: 530 - DNA, 777 bp, Unknown
  Ga0370498_000133 JGI
atgagaaggtcaaggagaagtaggaaaaccccttgtagaaagaataaattaaacagaaaaagaaaaataaattttattccaccatcaacaaaagcgagatggaattctaagttaagactgataaatatattaaaaaagatatatccaatatcaatatatgttgtagaagatataaaagcgaaaacaaaagaagggcaaagaaattggaataagaatttttcaccattagaagttgggaaaacatatttctataatattattaaaacatatggaaatcttattctaaaagaaggacgggaaacaagtaaaattagggaaaaattaaatttagtaaaaactaaaaataaattaaataaagtattttctgctcataatattgatagttgggtattagctaatttaccatttgatgttcaaacttaccctgataatattgatatgtattattttagacaaattgtattatacagaagacaattacagatgtttcaatttgctaaaggaggaaaaaggaagagatttggagggacagtatctcttggaatacctaagggaacggtagtaaaagcaaaatataaaaagaaagaaatattatgttatatcggtggaaatatgaatggtaaactatctgttcttaatatagagaatggtgaaagaataagtagaagcataaataaaaaagatataaaatatatgggatatatagcgaagtggaaagtagaaagaataaaagggaagaataaagagataacgagcaattcctccatacctgcgtag

SEQ ID NO: 531 - DNA, 475 bp, Unknown
  Ga0370498_000133 JGI
gtgtaataaccccttccaagcttttatcttggttgaggcttgttaaagtaaattatgccaaaatctaaacaacaagttaaatcaatgactagagtatccggtcttcctactcgtaagagtaggaagatacaggaaactgaatcatcttctcatggcagggaaaaatatatttccgatgtttctctagttggaaatttctatgataatcagtctcgaagagagcaattaccagagcaatctggacggaaggtaacttccaaatttgttacgaaaatatatattccagtaatttcttgtgctggaattgcattaatgccttgctctcctaggagagcaaaagaattaattaaaaagaataaagcgaagaagcagtttacaaatagtattttctatattaaattacttgaaagagatataggaaatattcaagacatatcatgtggaatagattccggatcaaagagagaagcaataa

SEQ ID NO: 532 - DNA, 1008 bp, Unknown
  Ga0197142_1009778 JGI
atgtatgttcctgtagttgatcgaaatcaaaaaccccttatgcccaccacaccaagtcgcgccaggcgttggattaagtctggcaaggcgactcctttctggaagaaggggatattctgcgtcagactcaatgttgaaccttctgaccgtcgaactcaaccgattgcggtaggcatcgaccctggcagtaagaaggaaggctggacagtcaagtccaaagctcatacttatctcaaccttcaaaccaacgccgtcacttgggtgaaggagcacgttgagctacgacggcagatgcgtcgtactcgacggtatcgcaaaacaccctgtcgtcagcccagggctaatcgagcgagaggtggtattcctccctctaccaaagctagatggcagtggaaactacgcctagcaaaatggttgagtaaattatttccaatcactacctttgtggtagaagacatcaaggcaaagacgaaaggtaagcggcggtgggatgtctcgttctctcctttggaagtagggaaacagtggttttacgagcaactggctaaactatgccaggtggtaacccgttcaggttgggagaccaaacaaatgcgggatactctaggtctcaggaagacgggtaataaaactgctgaagtcttcgaggctcattgcgtcgattcttgggtgttagccaactctgttgttggtggacatcttcagcctgacaacaaaagactggtgttcgttgtacctctacaatttcatcgtcgccaactccaccgtttgcaacctggcaaacaaggaaaacgcctaccctatgggggaactttaagtctagggttgaaaaggggtagtttagtcaaacaccccgaatacggactcacctttgtaggtggtagctccaagggtaggctgagtttgcatggcctagcagatggaaaaaggttaacgcaaaacgccaaaaaagaagatgtcaagtttttaactttttgttcgtggaggttctatgttagaagcgaataa

SEQ ID NO: 533 - DNA, 267 bp, Unknown
  Ga0197142_1009778 JGI
gtcaagtacccccagctttagctgggggcttgtgggattagagcctagccagctggaaaccacaggggcaaggaaagactagcctgcccaagcaacctaccttcgagtagggggcgtttgaagggaactgaaccagctggacgtggcagtccgaaagacgtagcgaatgcctccctagtttgctacctctctgctggtcagtggcgttagcgaagcgagccgcaaggcttagggaagtatacactccactaggagacttactctcat

SEQ ID NO: 534 - DNA, 699 bp, Human gut metagenome
atgccaaacaaagtgtatgtcatcaacaaacacgggcgtccgctgatgccctgctccccggcaaaagcccgtcatctgctggatgaagggaaagccaaaataaagaagaggacgccctttaccatccagctggtctacggaagcagcggctacacccaagaagtcattttgggcgtggacgctggaagtaagaccatcggaatgtccacatccacaaagaaggaagaagttcggctccatgtccatcatctggagagcaggaaggtaggcggcgacgccccggacaaccaagttaccctttgcgagagctgtcacgagaaactccacaaggggttgattacggcgaaggacttcaaaaagcgtaagcgtcgttccacacgggatgccacattcatgggcatcatgcggaagactttaatgcagaggctctgctctgagttgcctatccccgtcattgagaccaggggctacatcacaaaggcgacccgagagaagctgctggtgcttcccaagagccacaccaatgacgctctggcaatcgcacaggggaagcagggcttcaatgtgggctacctaccgggaatcgtacaaattaataagatttatacgatttgccccgtaaggcatcacaaccgccagctgcacaaggcgactatcctcaagggaggcatccgtaaatccaatcaagcagaaaagtac

SEQ ID NO: 535 - DNA, 310 bp, Human gut metagenome
gtcaataacccccaccaaatctaacgatttggagggggcttgcgagaaatcgtaagccctgattgactaccctaagtgtttcgagcactacgttactcaagaatgtaagaataggcaccggcgggcgtgaatccgaacctgccgcactgcggtgtgtgattaaaagctctgagggtaaggagcggtgttgcacacgaaaaccttgagataacattgggtacggatacctgacggccgaaaggccgcgtggctttttcgttagccacaatcaaagaagaaggaggaggaggaaggcatcatgccaaacaaa

SEQ ID NO: 536 - DNA, 1197 bp, Unknown
  Ga0307988_1006404 JGI
gtgaaagtctatgttttaacaaaaaacaaaaaatcattgatgcccacaacttgctctaaagcaagaatattaattaaaaaaggcaaagctagggttcataagagacaaccttttacaattcagcttttaaatagagtagctggagaggttgaacatgttaatctaggtattgacagcggagcaaataatattggtttttccgcagtatcaggaagagaagagttaatttcaggaacagttatacttgatgtgatgatgaaatcaagacttgatgacaggcgaatgtaccgaagaaacaggaggaaccgcctctggtacagaaaaccgagatttgataacagaaaacgcgctgacgactggttgccgcccagtattaaaaggcgataccagtcacatctgactattatcaataaaattaagtcactattacctgttaagtatatttgtatagaagtaggtaattttgatatacaagctattaaaaaaccgggaataagtagtacaggttatcaacagggcgataggtatggttatgcaaatctaaagtcttatataatagccagagaaaaaagtcattgtcagttgtgcggtaagagtgttataggaacaaagattaatctacatcacataatatcaagatgtaaaggcggaacgaataaagctgataatttggcactgttacatgtaaaatgtcataaaagaatacataaaaaaggtcttggaaaaaccttaaagagaaataaacagtaccgggaatctacatttatgaatataattaaatggaaatttaagcaggatttagtttgcactttaacttttggatttaaaacattctgcaaaagaacagagctaaatatcccaaaaacgcataacaatgacgcatttgttattgccggcggtacagaacaagcgagattgcttcatcttgaagttatacagaaacgaaagaataaccgctcgctacagaaaaacaggaaaggctttgctccggcaatacgcaggcaaaggtattcaatacagccgaaagatctggtaaggatcaaaagcaaatggctaattaccaacggttgtcactgtaaaggaacaagaatattagttaataaaagatcaattaacattaaacaagtggaaagcgttttcaacgtaggaacattaggagggtggcaattcctccccttgttaaaaagttataactag

SEQ ID NO: 537 - DNA, 243 bp, Unknown
  Ga0307988_1006404 JGI
gtcagttaccccatagctaaagctagggggcttatccgcaaggatatctaattagctgattaggaggtagaaatacagaagttaaaaaaggtgaaatacatacacaccaacaattacctccctagattgttgcaactgtgaactgtaattaaacaaagttcaaagacttagtgttgcagttttaaaaactttttttaacagctccgaagggaattaaccacgaaagtgaggtgacttgtgaaa

SEQ ID NO: 538 - DNA, 762 bp, Bioreactor metagenome
atggtatttgtattagatgcaaataaaaagtcattatcgccttgccatgaagcagttgcaagaaaattgcttaagcaaggtaaggctgcaatatttagaagatacccatttacaataatccttaaaaaagtagtagaagacactaaaaacaagcaagaatatagattaaaaattgattatggtagtaagcatacaggattagctatactacaaaataataatgtaatatggctagggcaaatagaccatagaacagatattaaaaagaagcttgatgaaagacgtatgtttagacgtagtagaagaaacagaaaaataagatatagaaaaccaagatttttaaatagaaaaagaaaagaaggatggatgtcaccaagtttagaaagtaggattaataatataaaaacatgggttaataggttacaaaaattaattccattaactcacatatcttatgaaaatgttaaatttgatactcaattaatgcaaaatcctgaaataagtggtattgagtatcaacaaggtacacttcaagggtatgaaattagagaatatttacttgaaaagtttggtagaaaatgttgttattgtggaaaagaaaacattccattagaaatagaacatataataccaaaatcaaggggtggaacaaacagaattgataatctctgtttagcttgtcatgagtgtaaccagaagaaaggtaatatgacagcagaagaatttggttatccagaggtacaaagacaagttaaagaaaca

SEQ ID NO: 539 - DNA, 241 bp, Bioreactor metagenome
gtcaactacccaacgactaaagtcgtggacttgatagccctatgttgaccaggttaaggtttgaaacagaacctacgttatctatgtcatgacaccctaggatgccctcctagttctaggctctgtcgtacaacattaaacaggtgtagtgggttaagccagtgtgttgtacatgtaagcatagataacattgccgagggagatgttacctgcgtaagcagagaaaggagaaaatcctatg

SEQ ID NO: 540 - DNA, 1329 bp, Unknown
  Ga0070738_10015183 JGI
ttgagcaacgtctttgttcttgatacccacaagcagccgctggccccggttcatcctgggcaggcccgcctgctcttaaaacaggggaaggccgcggtcttcaagccttacccattcaccctgattttgaagcgagccatccccaccgaagaggtccacgcccccccgctgcggatcaaaatcgatcccggcagcaaaactaccggccttgcgctcgtggatgaccacagcggcgtggtcgtctttgttgccgagctgtcccaccgggggcagcagatcaaaaaaagcctcgacacccgaagaggagcccggcggggacgccgccaccgcaccactcgctaccgtgctccccgctggcgcaatcgcaggcgagagccgggctggttgcccccctcgctcgtgagccgcatccgcaatgtggtcacctgggtcgagcgtttgtgccgcctggctcccatccgagcgatcagcctggagctggtccggttcgacctgcacgccatggagaacccggccatcagcggtctggagtaccagcaaggcactctggcaggctacgagatccgcgaatacttgctggagaagtggcagcggacctgtgcctattgtgggaaagagggcgttccgttccaggtggaacatatcgtgccccgtgcaaaggggggcagcaaccgcgtgagcaacttggtgctcgcgtgcgaaccctgcaacacgaagaaaggcacgtgtgatatcaccgagttcctcaagaagaagcccgaggtgttgaaacgcatccagggacaggcgaaggcccccctcaaggatgcagcggccgtcaatgctacccggttcgcgcttctggagcaggtcaagcaactcggattgccggtggagtgtggcagcggggggcgcacgaagttcaaccggacccaacggggcttgcccaaaacgcactggggagatgcggcctgtgtgggagccagtacgccagagcggttgcaggtcagaggggtccgccccttgttgatcgaggcgtgtggccatgggtgtcgacgggtgcgcaatgtcactgccattggcttgccccgctcagcgcccaaaggcccaaaacacgtgcagggcttccagaccggcgatatcgcccgcgccattgtcaccaccggtgccaagcaggggatctatgagggtcgggtgctggtccgggccagcagatcatttgatctgctgacgaagcatggacggattgctgggctcaatgcgcgcttttttcgccatctgcaccgctcggatggctatcgctacacccaaggagacgtctatgcaacccctgcccaatccacccgataa

SEQ ID NO: 541 - DNA, 278 bp, Unknown
  Ga0070738_10015183 JGI
gtcatggaccccggtttgaaaaccggggcttggagcaatccgagcgattgaagcaagccccgccctattccgaccgcaacatgagcagacttggcccgaaagggctccgttgggggcgaatacaccaataggtaccggtgggtgcgcggccagcccaccgctctacggccaggggttaaacagatcgagggtacggtcagtgcctctggcaaacaaaccgcttccaacattgtcgaggccaccattacccttgaaagaggaggctcagtttgagcaac

SEQ ID NO: 542 - DNA, 1293 bp, Human gut metagenome
atgccaaaggtctatgttctcaaccggcacgggcgtccgctgatgccatgctccccagcaaaagcccgtcatcttctggatgcgggcaaggcaaaagtgagacgcagaacaccgtttaccattcaactgctctacggcagtaccggctatgcgcaggaggtcatcctcggtgtggacgccggcagcaaaaccatcggactttcggcttccaccgaaacggaggaactgttctccgcagaggtcaagccgcgcaacgatgtggtcgagctgatgtccgtacgcaggcagttccgccgtgcgcggcgcaatcgcaccacccggtatcgtaagccacgcttcgacaaccgcgtgcggagcaagcataaaggctggctcgcaccttccgtggaagtaaaaatccaagatcatatcaccgccatccggcgcgtctgtggtatcctgcccgtcagcaaagtggtcgtagagaccgccgagttcgacttgcagctcctcaaggccgttgcggaagggaagcctgttccgcagggcgaggactaccagcatggggagatgtatggtcactacaacgtgcgccagtatgttttgtggcgcgatggctatacctgccaatgctgcggagcgcacgcgacccagaagaaagaggtgcggctccatgtgcatcatttggaaagccggaaggtaggcggcgacgccccggacaaccaagttaccctttgcgagagctgtcacaagaagctccacaggggattgattgaggcgaagaacttcaagaagcgcaagcgtcgtcccacacgggatgccacattcatgggcatcatgcgggcaacgttgctgcaaaggcttcgttccgagttgcctatccccgtcattgaaaccagaggctacatcacaaaagcaaccagagaaaagctgctggttctgcctaaaagccacaccaatgatgctctggcaatcacgcaggggaagcatggcttcaatgtgggctacctcccaggaatcgtacaaagcgataagacttacacgattcgccccgtgcgacaccataaccggcaactgcacaaagcgactatcctcacgggaggcatccgcaaagccaaccaagcggaaaagtacgtctgtggcttccgtctatacgacaaggtgctctacaacggtatcgagtgttttgtttggggcaggcggaccagcggctcttttctacttcgagcgttagacggaacaaaggtcaaagatggtgctggacacagaatcctcactttgctcgaacgaagcagcaattatctcattgcttaa

SEQ ID NO: 543 - DNA, 307 bp, Human gut metagenome
gtcaagaacccaccacttaaactctgacgagttttgaagtgggggcttgtggtgtaaaccgcaagccagattgactaccctaagtgtttcgagcactacgttactcaagaatgtaagaataggcaccggcgggcgtgaatccgaacctgccgcactgcggtgtgtgattaaaagctctgagggtaaggagcggtgttgcacacgaaaaccttgagataacattgggtacggatacctgacagccgaaaggctgagcggcttatttttagccgcacccaaagaaaggaggcatcaacgtatgccaaag

SEQ ID NO: 544 - DNA, 1161 bp, Unknown
  Ga0071116_1002195 JGI
atgccatgttcacccgctaaagggaaaaaattcttaagagaaggcaaagcaaaagtagtaaggagaactccctttacaattcaacttactattgcaacaggagagacaaaacaggatgttactctgggaatagatagcgggtatcttcatattggattatcagcaatcacagagaaaaaagaattattttcaggttctgttatattaaggaaagatatagttaaattgaattcagaaagaaggagttatagaagatgtagaagaaacagaaaaacctggtacagaccggtaaggtttctaaacagaaagaaagaagaagggtggttagctccttcattacaacacaaagagaatagccataaaagaattatagaaaaacttgaaaacatattacctgttaatgatatagtcatagaagtagcaaattttgatatacagaaaattaagaaccctgaaatagaaggggtagaatatcaaaatggagaacagaaaggtttctggaatgaacgagagtatgtcttatatagagacggccatacctgccagcattgcaggggaaaatctaaagataagatacttgaaactcatcatttagaaagcagacaaacaggaggtaatagacctgataatttaataactctctgtaaaacctgtcacagtaaggtatcagccgggaaaattactctcacagttaaaccctctaaaggttacagagaggcaggatttatgacgaccataagatggaaattactctcctctctaaaagaaagagaaaggaaactttcatatacttatggttatattacaaaaaagaagagaatagaactggcacttccaaaatcacatattaatgatgcttttgttatagcaggaggaaaagaacagagtagaagtaagtcttattctataatacaacacaggcgacataacaggtcattacaaacaaacaggtcaggttttaaaccttctattagaaagaaaaaatatccttaccagcctggagacacagtaagactgacaggtaaaatctggactattaaaggtgtttttaattatggaaactgggttagattaaaaaatagaaccggaacgattagaaatgtggcaactaagaaaatagaactgattaaatatggtggaggattttcttttgaatattaa

SEQ ID NO: 545 - DNA, 322 bp, Unknown
  Ga0071116_1002195 JGI
gtcaatgaccccgcccacaaggggacagggcttgcggtgcaacccgtaagttatcacattgcttagaggcttaaggaataatgttctttatgcagcagttattcaggagagatacatacacacctgcggatatctctcacgtccagtcagctctgtggttttaagttaaacagtcctgtggggtagggacagtgcttaaagcttaaaaaccctgaataacacctcgatgggatccaaccggttttaaaaggttccggaatagaacttgagagtatctattggcaaaatcttttagtaaggagtaatcaagttgtatagcttt

SEQ ID NO: 546 - DNA, 1326 bp, Human gut metagenome
atgtcagtttctgtttttgttctggacaggaagcaccggcctctgatgccgtgccgacccgctcgggcgcgaaggctcctgaaatcgggccgagcccgcgtcgtcaagcgcttcccgttcacgatccgcttggtggatcggctgatcgagaactctgacgttcagcccgtcctcgtcaagttcgatccgggctcacgcgagaccggcatcgccgttgttcgagccgacgggaagaggcgccaccatgcgctgttcttcattgacctcgttcatcgcggatcggtcatccgggaatgcctgagcgctcgttgtgcctttggccgtcggcggcgcagcaatctgcgctatcgagccccacggtttctcaatcgcaccaagccgcagggttggccggcaccgtcgcttcgacaccgcgtggatgccgtagccgcatgggcggccaagctcatccgtctcgtccccgcaacgggattgatggaagagctcgtcaagttcgacgcgcagaagctgcagaatccggaaatttcgggcgccgagtatcagcaagggacgctcttcgagtatgaggtgcgtgaatacctactggaaaaattcggcaggaaatgcgtctactgctcagccgagaacgtgccgctcaacatcgagcacgttgtgccgaaggcacgaggcggatccaaccgcctctcgaacctcgcgctcgcctgcgtggcctgcaaccaaaagaagggggcgcagcccgttgaagttttcctcaaagaccgccctgaggtgcttgagcgcctcaagcagcaatgcaggcgttctctctcggacgcggcggcggtcaacgcaacccgctggtcgcttctcaatgcgctcaagacgttcgggctccctgtgcagacgggttccggcgcattgacgaaattcaatcgaagttccttgggcattgccaaagaacattggctcgatgcgctctgcgcgggtcgaatcaacgcagcgcactatcccaagagcatgggcgtccttgaattccgatgcaccggtcgggggagctatcaacgtacgaggctcaccaagcacgggttcccgcgcggctttctgatgcgccaaaaacgcgttcacggcttcgccacgggcgacatggtcaaggccatcgtcccatcagggaagaaggccggcgtctatcggggccgcgtggccgttcgtgcgtcgggcagcttcaacattcagacgcccggaggcgtcattcaaggcattagttggcgtcactgtcaactgctttcctacaacgacggatacgggtatgcgtggctgcgccgcgcacctcattcctcccccgtctga

SEQ ID NO: 547 - DNA, 288 bp, Human gut metagenome
gtcaaccacccctccttaaaaggagaggcttgagccatcaagccggttgaccagcctcagtgatccgaaaggagaactacgttgtcgtcaggtgacaagacccgccccggggggcttcctcagctccgagctccggaaacggcagaagcagacaagctttgggtatgcacgaaacggtctgccgttgcaatgccggacggcaacattggcgaggggaattcaactttgttgatgtcacgggggcaaccccgattcgaaccgtaaggtttcaacaccatgtcagtttct

SEQ ID NO: 548 - DNA, 903 bp, Unknown
  Ga0116164_10013910 JGI
atggtatttgtgttgaataaagacaaagagccggttatgccgtgttctgaaaaaaaggcaaggaagttgttagaaaagaaaaaagctgtgatacatcgtctgtacccgatggttattcgtttgaaagaacaaaaagactacgaagtgaggggattgaggttgaaacttgaccccggagcaaagagaactggcttcgcggtgttgcatgaaaaatcagagcatgaagcggatgctatacttttaggtgagattatacataaagtttacgctcccgcaaaaggtaaaaaagatggtaaaccgcatatatatcatggtggcgcagctgcgttgtataaaagaagaatgttcaggataggcaggcgaagcagaaaaacaagatacagaccggcgagatggttaaacagaaaagcatcaagaaagaaagggttaccgccctcttttgaatcaagaataaaccagactgttcatgcggtagagaagttgatgaaatggttgccgattgcggctatatcagttgaacacgtcaagtttgatatgcagaaaatgagagatgcggatattgagggtgttggttaccaacaaggtacacttgcagggtatgaaatcagagagtatttactcgaaaagtttgggagaaaatgcgcttattgcggtgcggaaaacatcccgcttgaaattgagcatattgtgccgaagagtagaggtggcacaaacaggattgataatcttgctatcgcttgccgtaagtgtaatgaagataaaggaaacaagctgccggacgagtggttagctgagttaaaaacaagcagtagaaaatcagacaagctgcgcgcaaaaaactttgagaaggcgaaaagagatgttaaaaagactttgaaagacgcggcatttgtgaactcaact

SEQ ID NO: 549 - DNA, 313 bp, Unknown
  Ga0116164_10013910 JGI
actgttgaaaagaaaagaagtaatggttcagactcgcgcgtgcgcgttacctttagtatttcaatactaaactgaaccagactaagttctacgagaactacgttatttgggttacgataccttcaggtgcttctccagccggaagctctatcatcgtacattaaacagagttaagggtaaagcgaaatctcagtgtgtgcgaagcaatcaagcctttataacattgtcgaggagagaggatttaatcccgttacaagccgcgtgagcggaaaccctacggggttattttaaataccaaaggaggaaaaaaatg

SEQ ID NO: 550 - DNA, 813 bp, Unknown
  Ga0074478_1419092 JGI
atgttagtgttagttttaaacaataatggcaaaaatctaatgccatgcagtccacgaaaagcaagacttttattaaaattaggtaaagcaaaagttaaattcagaaaaccttttactatccagcttatttatggttcagcaggatataaacaaccaatttatttaggaatagataaaggttttaaatttacaggaattagctatattataaaagacaaaataattttatcagctcaaataaaccatcggattgatgtatctgataaaatgattacaagaagtcaaaatagaaaacagagacgtagtaggctttgctatagaaaaccaagatttaataacagagcatcaagtaaaagaaaaaatagattatcgccatcagtaaaaacaaatatagaagaaatcttaaggataattaatagaatcaaacttcctacaactcatattgctatagaagatgtgcaggttgatattgcaagattaaataatcctgacttaacaggaaaagattatcaaaaatcaaacagattgaatgaaaatcttagaattgcatgtctaatgagagataattatcaatgtaatgtctgtaaaaagaaaaatttaagattagaagtccaccacattattccaagaaaagaagagggaaaagactcaataaccaatttaatagcattatgttcatcttgtcattcaaaagttcacgacaataagattaaattagatattgatggtgtaagcggttttaaagataagatttcacagcaggcaatgcaaggcaaatcttatttatatgcagaattaagtaaaattggataa

SEQ ID NO: 551 - DNA, 251 bp, Unknown
  Ga0074478_1419092 JGI
ctcaatctgatagttgctaagtctataaaatatatttattttttatagatatgtaactaacagagggcttagaaataagcaaaagttgtttaagctatcttacctttagatgttattccagtctgaagctctaaggttcataattaagggtaagcgaaagccgaaagtgttatgaacgtaaaaaacttttacaacagcctcaaggaatatctaactcttatttataggagaaacactttatgttagtgtta

SEQ ID NO: 552 - DNA, 411 bp, Unknown
  Ga0400266_0006374 JGI
atggtgcgtgcgtatccgtttacgatccggctgaaaggccgtgccgatggcatcacacagccggtccgtatcaagatcgatcccggcagcacgaccaccgggatcgcagtggttcgagaaaacggccagaagcaacacgttctggccttgatggaattagcccatcgcggccgcacgaaattcaatcggcagagactgggcattccaaagactcacgcgctggacgcggcttgcgtcggagaagtcgagatcgtagagggttgggacgctccaaccctagcgatcaaagctaccatccagggaatatcccatcgccactgtgttttaacccagcgagcagatagctacggctatcacatccaacccaaccaacgaaaggaggagggagacagggaaaacgagtcgcgctga

SEQ ID NO: 553 - DNA, 295 bp, Unknown
  Ga0400266_0006374 JGI
gtcaactaccccgccctaaaggacggagcttgtagagaacaccctacaagccaggttgaccagggaaagcggacacccacccgctacgtttgccacaggtcgttaagacccactgcggtgtgcttcctcagcaccggacactggaaaactggaatcacgctggcaaaaggcaaagcgccgaaggtttcagttgccgcgcaagcgggagccggtggtagacattcccgaggggagagaggcttcggcctccgtcacaaggcccgtaagggcattcattgaaaggaaagtaatgtcg

SEQ ID NO: 554 - DNA, 1383 bp, Methanocalculaceae archaeon
atgcagaagttatcagtaaagttaaagaacgcaccaggggatgctccacaagttccctgctctgtaagtgatggtttaaacagagaggaaactctcagtgatcgtcgcaaagtactgtctgataacagctccgaagtggatcaactctctggcaagagagaacaggacttgagagtccctgttataaacatgcgtggagaagcattaatgcctactacccctgggatggcacgaagaatgttggtttctggcaaggcaaaggttgttaagagagcaccattcgttatccaaatgacaaaagctactggcgaaaacaaacagtctgttacttgcgggattgatatgggttatgggaagattggttattcttgtgttacagataagtctgaattgtttgccggtgaggtagaggtggacaacagaacagctaaaaggatggaaaagagaagaaagtataggagaaatcgtagaagtaggatgtggcatcgtgaacctcgttttaacaatcgtaagaaagacaaaggatggttgccaccatcaacccaaagaagggttgatacacacattaggttagttgagaaactgtcgcagtggttgccgataacgaaggtgagagtagaagttgccaaatttgatattcagaagattaagaaccccaacattgaaggagtagaatatcaacagggaagtatgtatggttaccaaaacaccaaagaatacattctattcagagaaaaaggtaaatgtcaactgtgctctaatggttggaagaaaacagataggtgggaactccaccacattatttcgagaaatgaggggggaacagacaagaccgacaacttagcactattacataaaaaatgccacgaaaagttacataaaaaaggattaaaactaaaaccgaacagacaatataaagcagagacgtttatgtcaatagcgaggtggaaaatagttgatggattaagggaaaaattttacaccgaacacacttatggttataaaacaaaagttaagagaaacaggttaaatttggaaaaatctcacagaaacgatgcctttgttatagcaggcggaaatgggcaagtaagatgtaaagaattacatatcgttcaaaagcacaggaataatagatctttgggatatcagagaaaggggttcgcaccatcatcaagaaaacaaagatacaagatacagcccaaagatttagtgaagattaatggagaatggaaagaagcaaaagggatacattgtaaaggagaacgtgttatggtagaaggaaaatcggttaatggtaagaatatagaggaaatatacaattttggaagtttccaattcctctccacatctaaagaggggagtttacttggaggtaacagatga

SEQ ID NO: 555 - DNA, 251 bp, Methanocalculaceae archaeon
gtcaatcaccccatgactaaagtcaggggcttgagccgtgaggcttgagggcaattggttgattaggaggcaataaatgcagaagttatcagtaaagttaaagaacgcaccaggggatgctccacaagttccctgctctgtaagtgatggtttaaacagagaggaaactctcagtgatcgtcgcaaagtactgtctgataacagctccgaagtggatcaactctctggcaagagagaacaggacttgagag

SEQ ID NO: 556 - DNA, 849 bp, Unknown
  Ga0265294_10038476 JGI
atggtttatgtaattaataaagatgggagtcctttaatgccttgtaaaccagcaatagcaagattattgttaaaagatggtaaagcaaaatgcataagaagaactccatttacaattaaattactatatcatgctacagactatacacaagatttaactttaggaattgatactggtagtagtaaaataggaagtgcggtagcaaatgacgaaaatgaagtgtattatatatcagaagtagaaattagaaatgatatatctgacaaaatggacaaaagagctaaatataggagaactagaaggaataggaaaactagatatagggaacctagatttaataataggaaaaacagcattaaaaaagatagattttctcctacaatgacaagtaaaattaattcacacttaaaagaaattgattttgcaaaatcaataattcccattacaaatataataatagaaacagcaacatttgacccacatgctttaaaaaatccagcagtattaagtaataaatggctttatcaaaaaggaactaattatggatttgcgaatactaaagcttatgtattaagtagagataaatatatttgccagtattgcaaagggaaaagtaaagacagcagattagaggtacatcacatagtttttagaaaaaatggtggctcagatgatgcagaaaatttaattacactttgtaaaacttgtcatgatagtttgcacaaaggagaaattaaactaaagaagaatggtaaaattaaaggacaattaaaacacgcaacacagatgaatagtataagacaacaattattaagacagctaccaaatgtaaaagaaacctttggattt

SEQ ID NO: 557 - DNA, 292 bp, Unknown
  Ga0265294_10038476 JGI
gtgaactacccccgactaaagtcggaggcttctaaagtctaagttcaccagacttagtatagagaaatttatactacaatagaatagttatgatacctttggttgacgcatcagaccattgctctatcgtatatcattaagtagagttggagggtaaggctcggtgtgatatacatgtaagctattttattattgtcgagatgaggacggattctatatatggtaatagtatatagatacgcataacctgcttttaagcagagtgtttatccgaaaggatttgattttatgg

SEQ ID NO: 558 - DNA, 1278 bp, Wastewater metagenome
atggctataacttacgttttaaaccaagatggacaaccacttatgccaaccactaggtgtggcaaagtaagacgactattaaactcaggtcaagcgcgtgttgtacgcaaaagacctttcactattcaactaaattatgagcccaaaactaatgttgttaaagacttaacattgggtgttgatgcaggctcaaaaactattggtctttcagtcacttcagaaaatagagaatactatgcttccgaagtcaaactgagagatgatgtttctaaactattagagtctagaagtaactctagatatacacgtagaaaccgtaaaatccgctatcgcaaaccacggtttaacaacagaactaaatccaagccaaaaggttggattgcaccgagcattaaacacaaagttcagacacatgtagatgctgtaaaagacatcatgagctttttaccaataaaacaggtaattgttgagaccgctcagtttgatactcaaaaaatggtaaatcctgagatttcaggagtagagtatcaacaaggtgaactcatgggttatcacatccgagagtacttgttggagaaattcaagagacaatgtgtctattgtaaaaagaagaatattccacttgagattgaacatataattccaaaatcacgaggtggttcaaatagagtaaacaatttaactattgcttgtcgcgaatgtaatcagcgtaaagacaacatgacagccgccgaatttggctttcccaatgttcaaaaacaagcgtctaagggtcttaagcatgcggcacatatgaaccttattcgtaagtcctttttgacgcagttacaagagcttggaattgatgtaaaagaaacctttggatatatcaccaagaaaacacggatagacgccggattagagaaaacacatgcgattgatgctagatgtataacaggcaatgtcaatgtacaaccaattgaagacctatggctcaagaaaaaagtgagacgccataaccgcagcatccacaagatgacgctatataaaggtggagtcaaacgagcaaaacaggcaccatatgaaacgcaaggttatagactttttgaccttgtgtctgttgacggggccttatggtatgttcatgctcgtcgcgttaaagggggtttcactctaaaacgcatgtctgatggaaacagcctgaataaagccccatcaaaaataacctttgttgcgcatcaaccatcttatatacaagaaaaggtgccaaatactggagtaataacattgatgaaataa

SEQ ID NO: 559 - DNA, 309 bp, Wastewater metagenome
tccatcatcaataatcaccacctaaggtagagctttgctattatcataggtggggtttagtgaaacaactaaaccctgattgattagccttagtcttacatagactacgttagacttgaaataggtaccttggggtgttatacctagctccaggctctacggttaagcattaaacaattttgagtggtagaaatagtgtgcttagcgttaaaccaagtcataacattggcgaaggtattttatgggcttcgtgtcccagcttaccgcataaaacacgaaaatcacagaaaggcacatctagatggctat

SEQ ID NO: 560 - DNA, 1344 bp, Unknown
  Ga0206225_1000096 JGI
atgagtgtgtttgttttagacaaaaacaaaaagcccctcatgccgtgccatccggcacgcgcaagggatttgcttgcaaaaggaaaagccgccgtatttcggcgtgctccttttacgattattttaatcaaacgagcaaatgggatttgccaagatcttatccttaaatttgatcctggcagtaaaacgacgggagtggctctcgtcgcaaattttgagtgtagcgattgtgtcatttgggcggctcatttaaaacaccggggagccgctataaaaaaaactctggatcaaagaagggcgcttcgcaggggaagaagatcgcgccatacacgctatcgagcttctcgttttgaaaatcgaacgcggccgtccggatggctgccgccatctatccaatcgagggtagatcaagtagctcgcctggggttgcgactctctctcatagcccccgtaacatctgttgctgttgaaacggttcgtttcgatatgcaaaaacttaagaatccggaaatttcaggagcagcctatcaacaaggcactctttttggctatgaggtgcgagaatatctcctcgaaaaatggggaagaaaatgcgcctattgcgaaaaaacggatatccgattggagattgaccacatcgttcccaaaagttccggaggaacaaacgcagtcggaaatctcactatttgctgcagaaattgtaacgaaaaaaaagggaataaggcacttcaagatttcttaaaacagcctgtaaaggttgctcagattctttctagcagcaaaaggactcttaaagacgccgcagccgtaaatgcctcaaggcttgcaataggagaagctctgtccgttcttggcaaaccgatttcttactggagcggagggcaaacgaagcacaatagacagaaacaaggatttcctaaggaacattggctggatgccgcatgcgtaggcgattttgtctcgctgacaattccgcaagaaatttccgtactggaaatgactgcaaagggaagaggctctcgccaaaaatgcttagtcgatcgctttgggtttccaagaagtgctcccaaagcgcaaaaacgagtctttggctttcaaacaggtgatctcgtttctgcaaccgtcccttctggaaaaaagcaaggacattaccgaggatgtgttgctgtaagagcgacaggtaattttaatattcaaactccatgtggagtgattcaaggaattcacgccaaacactgcgtccttacgcagcgtatggatggctattcatacatacatttaaaagaggagcggcacttcctccccggcctaaaggccggagtttccgtgccgtcaagaggatga

SEQ ID NO: 561 - DNA, 278 bp, Unknown
  Ga0206225_1000096 JGI
gtcaaccacccctccctaaagggaggagcttgaaaagaaattaacaagctcgaagttgaccagccttaactttagagaaatctaaagctacgttaggagcgaatatataggtaccgtgggatgcttctccagtcccacgctctacggtaagtggttaaacaggcgtacgggttaaaccagtgctgcttacacacaaaccgctccataacattggcgaggagaccattacccgggaaaccggagcgcgggtaaccgcaaaaggtattttttaaatgagt

SEQ ID NO: 562 - DNA, 1281 bp, Unknown
  Ga0335049_0000303 JGI
atgtcaaaagtgtttgttttagataccaacaaaaaacctctagatcctgttcatcctggacaagctagaaggctattgaatcaaggaaaagcagcaatctttcgtcgctatccttttactatcattctgaaaatggaggttaatagtgatgtaaatccactccggttaaaaatcgaccctggtgcaaaaacaactggattagttgtagttaacgaccaaacaggagaagtaatttgggctgctgaattaacccataggggttttgctattagagaatctttaagcagtcgtcgtcaattaagacgaagccgaagaaaccgcaaaactcggtatcgccaacctcgttttcataatagaaagcgaggacagaaatggttgccacctagcttaatgtcacgaatttacaatatcttgacttgggtgaaaaagctgaaggagattgttcctattatggctatctctcaagagttagtaaggtttgatacccaagctattcagaaccctgaaataagtggaactgaatatcaacaaggggagttagcgggctacgaggttagagagtatcttttagaaaagtttaatcgacaatgtatctattgtggtgttaaagatactagattagagattgaacatttaacccctcgttcaaagggcggtagcaatcgagtttctaatttaggaattgcctgttcaaaatgcaatcagaaaaaagggaacaaagatgttatcgagttccttaaagggaaacaagatttagctaaaaagatattagcaagagcaaaaaaaacgtcttctgatgctgctgctgttaatgtgacaagatgggaattgtttaatcaattaaagcacttgggtttacctgtagaggtaggaagtggtggtttaactaagtttaatcgttgtcgtcagaatcttgataagactcattggcttgatgcagcttgtgtaggaaagtcaacacccaaattaattatcaaaggaattaagcctttattgataattgctacaggtcatggttcgagacaatcttgtagaacggacaaatacggttttccttctagatatgtgcctagaaacaaatttgttaaaggttttcaaacaggagatattgtcaaagcctttgtgacatcaggcaagaaaattggagtatatacagggcgtgtagctgtacgttctagtggtagttttaatatctcaacagctaaaggtctaattcagggaattagtcataaatattgtactcatattcacaaaaaagatggctattcgtatgcaacatag

SEQ ID NO: 563 - DNA, 251 bp, Unknown
  Ga0335049_0000303 JGI
gtcaacaacccaccgctaaagcgggggcttgaaaaagctctagttgaccagactaaggtagcaatacctacgttagtggcaagcgttaaagttcttaccttcagatgcgtagctagtctgaagctctaaaactcaaaggttaaacaggtctaaagggttaagccagtgcttttgggatagtaccgaccactaacattgtcgaagctcacatcaccctagaaataggagactccccaagagttatgtcaaaa

SEQ ID NO: 564 - DNA, 1275 bp, Scytonema sp. HK-05
atgcaaaattatgttttcgttattgaccaaaacaaacaaccactcaatccagtttctccagcacgagcaagagagttactcacaaaacaaaaagctgctgtatatcgggtttacccgtttgtaatcattctgaaacacgtggttgataacccccagagcaagccattaactatcaagctcgaccccggtagtcgattcacgggtattgcaattttggatcaagacaaggttgtttgggcggcagaactggaacatagaggctggcaaattaagaatgctttagaatcaagacgctctttacgtcgcagccgtcgtaatcgcaaaactcggtatcgccaaccacgtttcaataaccgcaagcgcaaagagggatggcttgctccatcgttgatgcatcgtgtcctgacgattgagacatgggtaaaacggctttgcttgtattctcctatcactcaaatagcgatggagttgattaagttcgatactcaaaaaatgcaaaacccagaaattgatggtgttgagtatcaacaaggggaactcgctggttatgaggtgcgagaatacttgcttgaaaagtggggcaggaagtgcgcttactgtgatcatgctggtgtacccctccaagttgagcatattcaccctagagcaaaaggaggtagcaacagagtcagtaatctaactttgtcatgcgaacgatgtaacaccaaaaaaggaactaagtctataggcgagtttctcaaaaagaatggttctaggttagaaaaaattcaacgacaagccaagcaaccattaaaagatgcagccgcagtcaatgcaactcgttgggaattatttcgcaccttaaaaaacatcctacccaccacaacgggaacgggtggacaaacgaaatataaccgaacaaggcttgaactacccaagcaacattggattgatgcagcttgtgttggagaagttaataatttaaatctgttaacccaacagccactgaagattaaatgtactggttggggaactcgtcaaatgtgcggcactgataagtatgggtttccgacccgtcacagagaacgcaaacaaattcactttggtttcaaaactggcgacattgcaaaagctgttgtcacttttgggaagaaggttggtacatatattggtcgcgtgttatgccgcaagactggcagctttgacattgcaaccattagtggtcgtgttgcaggtattagccacagattttgtatatcaattcacaaaaaggacggctattcgtatggattttag

SEQ ID NO: 565 - DNA, 242 bp, Scytonema sp. HK-05
tcgttaaatgccaaccccatgcctaaaggcaaggggcttgtcggttgactcacctgaccagactactcgtttagggcaagagttaaagacctacttcaggatgcttgctagtcctgaaccctagaaccgaacgattaaacaggcttacagagaataaaccagtgtcgcgcgtgatagtaccgaccctaaacattgtcgaagcaaactttacccgcaaggagtatgcagtaatgcaaaattat

SEQ ID NO: 566 - DNA, 1458 bp, Unknown
  Ga0120161_1001269 JGI
gtgccggacggtttccggtgttttcaggaaaggtgcattttgtcggtgttcgttctggatcagaaactgcgccctttgatgccgtgcagggaaaagcgggcgcgcaagctgctcgctgctggccgcgcgcgcattcatcggctgtatccgttctgtattcggatcgttgaccgcgcgcttgaagattccgtgttgcagcctctggtcattaagattgatccaggcagtaaagtcactggcttggcagtttgtcggatatctgaagcagttgacgatgatggtgtcgtcgctcccgtcatgcatatccagttcttgatggaactgttgcatcgcggacagacaatcaaacaatccctacatgcacgcagcagcatgcgtcggcggcggcgtggcaacctgcgttatcgtcaaccgcgctttgataatcggacacgtcaaacagggtggttgccgccctcgctgctccatcgcgtgctgacgatagaaacgtgggtcaatcgcatcagaaacatggcaccgatcacacagatcgcgcaagagttagtgcggttcgatatgcaaaagatgcaaaaccctgaaattgccggtatcgaataccagcaaggcacgctcgcaggctacgagctgcgcgaatacctgcttgaaaagtggaaccgtgagtgttcttattgcggtgcaaaggaccttcctttgcagatggaacatatcgttgctaaagcgaatggcggtagcaaccgtgcctcgaatttgtgcctgggctgtgaatcttgcaaccagaagaagggcgcaaaggatatccgcgccttcctcaaaaatgacccgattcgattggcgcaaattttgaaacatgcaaagatgtccctacgcgatgcggctgcagttaacgccacccggaacgctctactgaaagtattgaaggcaactgacttgccggttgaaaccggcactggtggccgcacgaaatggaatcgcagtcggcttggcatcgtcaaaacccatgctcttgacgcagcttgtgtgggtgttgttgccgatgtagttagcatcaatgcgcctgcattacaaattacgtgcatgggccgcggaacccacagcagaactcttttagaccagtatggtttcccgcgcactacgctgccccgaacaaaaactttctttggcttcaagactggcgatatgatcactgctgaagtcaccaaaggcaaaagaattggctcccataaaggccgcgtcgcggtacggtcctctggatacttcaacatccagtctggtatcaaaggcatgaaagcagttcaaggcattcctcataaggattgccgtatcgcgcaacgcgccgatggatataactatttgtggaagtcggtttctgaccaaccaaaggcaaaggcatcgactgctgtgcagtcggctccttgcctcaccgccctgaaggacggtgtatctcggagcatattctga

SEQ ID NO: 567 - DNA, 397 bp, Unknown
  Ga0120161_1001269 JGI
gtcaactaccccgccctaaaaagacggagcttgaaaggcgaaagcctcgatagttcaggttgaccagggttagtgataatcggcgcaagctgatgttcactccgttgtaagtaggtacaaaaccaacgccgggacgcttcaccaatcccggatagaagtgcgaaagcatttcggttgaagttgcgatcgcagacaagcgacagggcaaggcacgaaacggatcgcaaccgggtagcaaagcaccgctgcttaaaaccggcttacaacattcccgaggtgagcggtattgtcaatctatcggcggtacccgtcactaggcgcgtaagcgcattgcgccgtgaggcgtcttgccgtgccggacggtttccggtgttttcaggaaaggtgcattttgtcg

SEQ ID NO: 568 - DNA, 1275 bp, Cyanothece sp. PCC 7822
atgtcaaattttgtatttgttctagatgcgaagaaaaaccctcttagtccctgtcatccatcagtagctagaaaacttctcaagcagggcaaagctgcggttttaaggcgttatccttttactataattttgaaaaaagaatgccaaaaacccacagaaactatcaaactaaagctagaccctggaagcaagacgactgggattgcattagttcaacaagacaagcttatttggggagcagaattaattcacagaggacaacagattaaagataatttgttaactcgaagacaaattcgtcgtagccgtagaaaccgaaaaacccgatatcggcaagcgcgatttctaaatcgtactcgacttaaaggttggcttcctcccagtctccgacatcgtgtagaaacgaccatgacctgggtaaaacgtatttgcaaatttgttcatgttactaatatttcggtagaacttgttaaatttgatactcaagctttagataaccccgaaatatcaggtaaagaataccaacaaggagaactttttggatatgagattcgagaatatttacttgaaaaatgggggagacgatgcgtttactgtggtattaaagatgtaccgttagaagttgaacatattctagcaaaatcaaaaggaggatcagacagatgttcaaatttaactatttcttgtagaatttgtaatcaattgaaagggaatcaagatattaaagatttcttatctaaccaacctagtttactagaaaagattctaaaacaatctaagcaatcccttaagaatgtcgctgctgttaacacaactcgttgggcattatttaacaagctgaaagaaacaggattatcaattgaaacaggaacaggaggtagaactaaatataacagatgtagattaaatctagaaaaaagacattttatagatgcgggatgtgtcggaaatcttgaaagcttaaaactattaacaaggcaaccattgttaattaaagcgacaggacacggaaatagacagatgtgcggaatcaataaatacggttttcctattcgacatcggtctagaaacaaattttacaaaggatttcaaactggagctcaagtaaaagcagtagttacaaaaggaaaaaaagttggtgtttatttaggtcgagttttatgtcgagcttcgggccgcttcgacatagcatcccatcaaggcagaacaacaggaattacctataaattttgcacagctattcaaaaaaaagatggatataactatgagttttaa

SEQ ID NO: 569 - DNA, 266 bp, Cyanothece sp. PCC 7822
gtcagcaccccgcattgaaattgcggggctaggctacgcctcgctgcgcgtccatgcccccagtttcagttagttgaccagcctaagtcttaaatgactacgtttttcaggtcataatacctacaaatacgttgctagtttgtagctctattgttaacaattaaacagttttacgaggggtaagacagtgttgttaacccaacaagccttaaaaacattggcgaagcgaactttacccgaaaggagagacagaaatgtcaaatttt

SEQ ID NO: 570 - DNA, 789 bp, Unknown
  Ga0193910_10667 JGI
atgaaagtctatgtcattaacaaagacggtcgtcaattaatgccttgccgtcccgcaaaggcaagaaagctactgcgtgatgaaaaggccaagtcagtgaaacgactaccgtttacgattcaactgaaatgggactgcgaagagaatattcagaaaataaccgttggcattgataaaggtagccatacgacgggttattgtgccatagccaatggtgaaatcttaatgtcaggctatatcaaccatagaacagatgttaaaaagaagatgcaaggacgtgctgctaatcgcagacaaagaagatcaaggttgtggtatagaaaggcacggtttgataatcgcgaagccgcaaagcgtgcttttaggttgcccgtctcaatcaaaaccaatgtagaagaggttataagaacgataaacaaattacctttaccgattaaagtggttattatagaagatgtgcaaattgatattgcgaaactgaatgatgccaaactaaatggtaaatattatcaacaatcaaaccgactgcatgaaaatctcagactggtttcgaggtttaagttttttgaagaaaaacttaaacctcgaaagttgattcgagatcatttcacctgccagtattgcaaggcaaagcagacaccacttgaagcacaccacatccattatcgaaaaaatggcggttccgagacgattaaaaatctgataacggtttgttcgaattgtcatgacgggattcatgatggaacaatcacactcaaaaagaaaggggtggatggctttaaagatcag

SEQ ID NO: 571 - DNA, 241 bp, Unknown
  Ga0193910_10667 JGI
attataatagttacctaaccaatggtatttaatggtattgtatggaactaacaggcggctaataattagcagaagttagataggttataacacctttaaatgttcaatccagtttgaagccctgttgtttatctttaagggtagtggaaacacgaaagtgagataagcgcaaaaagcctttttaacaacgccaaggattacttcactcttaaccgagggcctaaagccactatttatgaaa

SEQ ID NO: 572 - DNA, 968 bp, Bacillus sp. AFS014408
atgcgtgtatttgtcaagaatgtaagaggagaaccgctcatgccttgcagtaatcgcaaggcacggcttcttctcaaacaaggaaaagcaaaaattgtgaagtacacaccatttacgattcaactcctatatgccaccggtgaaacggtgcaacccgttacaattggcgttgatagcggagcaaagcatatcggtattgcgattactactgcagataaagtgctagcaaaaggaaccacccagctgcgtcaagacgtcaaagaaaatcttatactaagagctacattacgcagaggtagaagacaacgaaaaacaagatatcgagaagtacgttttctcaaccgaaaaaagaaagaaggatggttaccgccatcgattcaaagcagagtggataaccaaattcattggattgaaacatttcgctcgttattaccatctccaaaagtgattgttgaagtaggggaatttgatgcacaaaagctaaaaaaccccaatatacaaggaacagaatatcaacaaggagatacttttggcttttggaatacgagatactacgtatttgcgagagacaactacacctgtcaaatttgtaagaaaaaaggtggtattttgcatacgcatcatatcattgaacgatgcaatggcggttcgaatatggcagataatcttgtaaccgtgcatgatgaatgtcatcaaaaacttcatcaagggaacatcaaacacagtttcaagaaagtcaaacaatataaagaaactgcttttatgaatatattgcggctgcaaatcatgaatcgtttagattgtgacattacgtatggtagctacaccacaccaaagagaaaagaacttggattagccaaaacacatgcaaatgatgccattgcgattaccaatcccatacaactacaagaatacgatcaaagcggtgaattttgcatcaagcaatttagaaagaaaaaacgctccct

SEQ ID NO: 573 - DNA, 265 bp, Bacillus sp. AFS014408
gtcaactacccaccgcttaaacgctaacacgttttgaagtgggggcttgtaaaaagctctggttgtctagcctcagtctttcgtggactccgttcgtaggttgcatacccaagaatgattccctagttcttggctctatggtggctctgtaacagttctgattgggaaggaacggtcaaccacatgccttcttgcatgagaagttgcctacacctacaaacattggcgaagggaaacaaactcttaggagggacaaaacatgcgt

SEQ ID NO: 574 - DNA, 1227 bp, Unknown
  Ga0315282_10014819 JGI
atgcaaaaggtgactagactaagtccttcgaggcctacgtgtatcgggctacaagaacggcaagatgcctccctagtcttgccctcttcggaagaaccactaaattccacgctcccacaaagggaactaagcctgatgcacattgtcgaagggaaacacgacttggaaaagaccgtaatcggtagagttccagtagtgtcagcagatggaacacctttgatgccctgtaaaccatccaaagcaagaaaactacttgaaaacggaaaagcaacaaaacaatggaacaaactaagcatattctacctgcaactacacttcaaccctaagaaaccgtcaactcaaccattagcattgggcgttgactgtggaagcaagtctgaaggcttttctgtcgtcggcacaaaagacactgtgctaaacatcatgtccaaagcaacaacatgggtcaaaaaagcagttgagcaaagaagacaaatgcgaaagacaagacgcaacagaaaaaccagacgacgtgaatgcaggttcaacaatcggttagcccaccaaaaatatattcccccttcaacaagagcaaggtgggacacgaaattgcgtgtaattcgccagttggagaaaattttgccaattcaaacagtagtcgttgaagacgtcaaagccgtaacccgaaagaacggaaaacgatggaacaacagtttttcgccaatagaagttggcaaacaatacttctatgcccagataaacaaactcgtcgtaaaatcaggtgtagaaacgaaaatgctgcgagagcaatctatgttgaagaaacttgaggataagagcaaacctgtttttgaaacccactgcgttgatgcttgggtgcttgcggcttcagagacgggtgccaagcagcctacaacaagaagcctttattatcttgttccgctgcgttggcacagacgacaattgcacaggttgcagccagagaaaggcggaagaagaaaaccttacggcggaacatgctcgcttggactaaaacgcggaaccttagttaaacatcgaaaacacggtttctgttacgtcggcggaaacctaaacggtaaactcagcctgcacagcgtcaaaacgggtgaacgcctgaccaaatgtgcaaaaaaagaagagtgcaaaatcttgactaaaatttcgtttcgaactcaaacccaatttccccctcctacaagcaggagggtacccttggaggctttttga

SEQ ID NO: 575 - DNA, 338 bp, Unknown
  Ga0315282_10014819 JGI
gtgtattccaccggaaactcgaagggcaagagaaatcatgacgagccccattgttgccattgaccaaaacgctagcgtgaaggaagcaacacaaataatggtccaccgaaaaataaagaaactaatcgtggtggaccaaggaaaactagttggcataatcacacacaccgacatcattagcaaaatgccaaacatgatgtccacgctggaagcactgttacgaccgcaaaagacgtattgagctccactgcaaagccttgaaagcatttaagtggctacgcaataacatattaggagcaactgtgaacttgtcaactaccactcaacaagttgagtgg

SEQ ID NO: 576 - DNA, 1392 bp, Chlamydia sp.
atgcagaagttagtcggaagagatacatacacacctacggatactccactagtccgtagcaactgtgatctgtcattaaacagagaggaaactctcagtgtgtcagatttaaaaactccttctaacaaccccgaagtggataactctagcatacaggaggccatagcggcatatgtgtatgtgatttcaaagaatggaaaagctttgatgccttgctctaaggccaaagctagaaaattattaaaggaggaaaaggctctgattgtttgccacaaaccatttactattaaactggttttcaaatgcgaaaatcaagttcaaaaaatcactttaggtattgatccaagatatgaaaatattggtttatcagctatttcagaaaaaggagaattattctcagctgaggcaaaattaagaaacaatatttctaacttattagcaaagaaaaaaagctatcgtagaaatagaagaaacaaactctggtataggaaaccaagatttttaaatagaaaaaaaactaaaaatttacctcccagtttagagcataagctagattcacatcttaggatggtaaaaaaggttctctcttttattcctatttcaaaaatcaatatagaagtagctaattttgacattcaaaagattaaaaatcctcaaatagaaagctttcaatatcaaagaggagatttgtatggatatcaaaatttaaaagcatatcttgtagagcgcgagatggcaaaatgccagctttgctctaaaaaatcaactaaaggcaattcttttaggattcatcacattattccaagaaatgagggaggaacgaacaagactaataacctatcgttgctacatgaaaaatgccatgataagttacactccaaaaatctacttcatattttaaaaaagaataggcagtttaaacctgagacttttatgtcttcaattcgttggaaactagtttctgaattgaaaaaactttgcagcgatactgtcctatcttttggatatataacaaaaattaaaagaaattctctcaagctcgaaaaagaccatcatacggatgcatttgtgattgcgaatggaagctcagaaaaaagagctcaaccttctttgtttttgcaaaaaagaaaaaataatcgctctctacaattaaatagaaagggcttaaaattatcgattagacgacaaagatataagattcagccaaaagatgaagtgcaagtgaaaaacaaaaaatatgcagttataggcatttttaacaaaggtagttggttaagagttagagacaaagctaaaacatttaattttcagatttcgagagttgaaaaacatttttataataacggctggcaattcattcattccctaaaagaaagggttttcttgccataa

SEQ ID NO: 577 - DNA, 258 bp, Chlamydia sp.
gtcaatcacctctccctaaaggaagtggcttgaaccgtgaggatcaggggtaactggttgattagggggcaaaaaggaaactttatgcagaagttagtcggaagagatacatacacacctacggatactccactagtccgtagcaactgtgatctgtcattaaacagagaggaaactctcagtgtgtcagatttaaaaactccttctaacaaccccgaagtggataactctagcatacaggaggccatagcggcatat

SEQ ID NO: 578 - DNA, 1647 bp, Unknown
  Ga0223845_11964739 JGI
atggaatacaaagaatatgtatatgtaattgataaaaatgatatgccgtgcaatccgatcactcatggaaaagccagatatttattaaacaataatatggctgttataaaaaaccatgatccatttgttatcaaacgaactgatgattatttaaggggttttgaggttgataatcattatgtcttaaaaattgacatgggatataagcatattggattttcaataacttctgaatatgatgaggtaatttgtgggcaagttgaattgttggaaggaatgtctaaaagattagcggaaagggcaagatatagaagagggcgcagaaatagactcaggcataggcgtaataagaacatagatattaaaacaattaagaatccaaattacaaaaatggcaatgaagacggctggttcgcaccgtcaataagacataaaatggatactcataccagacttgttgataaattgagggcgtggattcctattgaccgtattgaattagaagtttcaaactttgatattcagcagatgaaagcagatctgaaagattatgagatgcatggtactgattatcaaaatggtgaaatgaaaggatatgataatgtaaaattatatattaaagagcgtgacaaatacacatgccagtgttgtaagaaaaaaacaacatctggggaagtacaccatattattccaagaagttggggtggaagtaatcgcccaggaaatcttatatacctatgtgtagaatgtcactccaaatgtcataggaataataatgataatgacttatttagggatatccaagaaaagagagtcgatggtgattttaaagaagcgactttcatgaatgctgttcgctgggcaatttacgatgctttaggagagcatttcgatgtagatgcatattttggatacgaaacaaatagaaatcgcaatgcagctaatttgccaaaatttcatcacaacgatgcagtgtgtattaattcatttaataatacttctctttcaaaatcattatatatcattaaacaatcaagatgtaataataggtcgatgaaagatttttttgatgcaaaatatattgatagtagaactggcaaagtagcaagcgggaacgatttaaaaaaaatacacaaagagggtaggcttaagagatctactagaaaagaagatataaataatttaagggtttttagacaagaaaaagtcaagtctggaaatgaacgcaattcttgccatagttattgtttaaagcctggcgatttaattaggatcattaaagataataagataatcgaagtaaatactatgcaaaaaaggaataatggttttataattgtatgcgataatccagatgaggatgcaactagcgaacagttaacattctctataaaatcagacgaatacgaaaaattaaaaactacagggaagtgtaatcgcatagagattgttagaacaaggcgtggtttaatttggtacaggtatgatcgtgttgaatttgaagaaaaacatgtggatcagtatcatattaaagaagtagatgcagcagaaaaagcagctagatcaaaagaaatcaaagcaagaaaagaacagaaaaagaaagaaaaagatgcattgagagaatccaatgaaaccgctctttcgtaa

SEQ ID NO: 579 - DNA, 316 bp, Unknown
  Ga0223845_11964739 JGI
ctaaaacctcaattccaaaacaattttagaacattataaaattatgtggcaaaccaaaaatagattaagagaagttcttatttgaacaatatctacgttattatgagataatatattattgtgtaactctagcaataaacatatcgcaaaagtttaaacatccaaagccatacaatattaatggaagtgactgagcagtaatgaattgaatttattacaagactcgtaataacattatcgaagagtatgaccgctatttagcgagatttatttattaaatattaaaaaggaaataaatatggaatacaaagaatat

SEQ ID NO: 580 - DNA, 1074 bp, Unknown
  Ga0376681_0131425 JGI
atgtttgtaccagtcatagatcaggaccagcatccactgatgccaacgaccccagcacgtgcacagcgttggatcaagagtggcaaagccacggctttctggaaaggtgggatcttctgtgtacggctcaacgttgatccatcggcccacgtcctgcaacccatcgccataggaattgatcctggaagcaagcgtgagggctatagtgtcatttcagcctcgcatacctacctgaatatccaagccgaagccagggatggcgtcaaggatgcagaaaaggactcgaccaggatgcgtcggacgcgccggaatcgcaaaacgccctgccgccagccacgccagaatcgcaagcagagcaagcagaagcttcccccttcgaccagagctagatggcagtggaaacttcggttggctcgcttcttgaaccagatttttccggtgagtgcctttgtggtggaagatgttgctgccgtgacgaagaaaggcaaacgacgctggaacagcagctttgctcccctggaagtcggcaagcactggttctatgaagaacttaggaaacttgcacctgtagcaatcaaaccggggtatgaaaccaaagtcttgcgtgagcagttaggcttcaaaaagaccggcaagaaattggccgaagtgtgggaagcccattgcgttgatgcctggatactggcttatagcgccattggcggcaagacgacccctgataatcagcgactggtctgcatggtgccgctcaactggcatcaccggcaactccatcgcttcaaaccggagaaagggggcaagcgaaagccctacggtggtacactctcgcaaggcatcaagcggggaacgctggtcacccatccaaggtggggaaaggcgacagttgggggcactatggacggcaagctcagtttgcacgatcctcatacgaacaagcgactgacgcaaacggcgaaagtcatcgattgcctgcccatcaagttgttacgctggaggacgcggctcgtgcctcctgcgctgatccccgcgtcccctgccccaaaaagggaagacttgcttcctccccggcttgaa

SEQ ID NO: 581 - DNA, 240 bp, Unknown
  Ga0376681_0131425 JGI
gtcaagcacccccgcatcgaatgcgggggcttgtgaagcgaaccgacttgccatcggggaaccaacgagggcaactgcgagactagcttgtccaagctccggcaccggggcgattgaaggaagctgaatcacctgggcatggcagcctatagaacgagcgagacgcctccctaatcccgctcctcttcagtggtcagcagcgaagggaacatattcacccgcaaggggcttatcgcacat

SEQ ID NO: 582 - DNA, 1515 bp, Unknown
  Ga0315902_10061306 JGI
atgcctacgcacaaacataagtccaagacctaccagcagatgcttcctcagtctgctgctctagaatcgttgccgatttccacgaaagtggataaggcaacgaagacggctggtgctgtgcattgtcgaggggagagcccttgcctaaaccgcaaggggcgttaccacctggcaacaggtgagactgagtcggtaacggctcccagcatcttcgtgctggccaaatcgaagacacccctcatgccctgccatccagcacgggctagagaactaataggaaacggcaaagccgtgatctatcgccaccaacccttcgtcattcggcttaccgctagaaccgaaggcaatgtgcaaccgatccagctcaagcttgatcccggcgcgaaaacgacgggcatcagcgtagtggtaaccgctaccgcgtccagcaaattggacaaagtagttcgacacattgagctgaatcaccgcaaagaaaacgtgaagaagcggatggcgcaacgcaaaacgtttcgccgccgtcgccgcaccgcaaacctgcgttgccgcaaagctcggtttctcaatcgcggtaaaattgggaagatcgcaccatcgatcaaatcaaccctcgaccaaactcggggatggatcaatcggctacgccgctgggcacccatcacttcgatcgtgattgaaaccgctcgattcgatgctcagaaaattcagaaccctgaaatttctggcgtcgaataccaacaaggaacgttggctggcttcgaagtcaaagaatacctcctcgataagtggtgcagaaaatgcgcttactgtggggataaaaacaccccactcgaaatcgagcatatcgtcccgaaatccaaaggtggatcagatcgagtcagcaacctcacccttgcctgcactccgtgcaatttggcaaaaggaaatatggatgttgccgatttacttgcgggcaaacccgcccggctcaaagccattctggctaccgccaaaaagccgttggcgtcatgtgccaccatgaacatccttaaacctaggttgatgcaaatggctcacgaaactggcttgcccgtgacaactgccacaggcagcatgaccaaattcaaccgcaaacaatttggtattcccaaaactcatgcgcttgatgccgcattctgcgggccaatggaaaaaagtttgaaagggtggaaccaatccatcctacaaatcaccgcgacaggacgtggttcgtatcaacgcactcgcaccgacaaattcggatttccaaggctacgcctgccacgaaccaaatctgtccgcggctttcaaaccggcgacctcgtcttaactcccaaaggaaatggtcgcatcgctacccgctcctcgggatactttgcgctcgcaacggttgatggcagcaaagccaccatcaaccactcaaactgccgcctgctccaaagagccgacggctaccaataccaacaaacaaacaaaatcatctcgcagcaagctgcggggtttctaccctaccgttaa

SEQ ID NO: 583 - DNA, 224 bp, Unknown
  Ga0315902_10061306 JGI
gtaaaatacccctaggcaagcctaggggcgtttttccagactaagacatagcaatatgcctacgcacaaacataagtccaagacctaccagcagatgcttcctcagtctgctgctctagaatcgttgccgatttccacgaaagtggataaggcaacgaagacggctggtgctgtgcattgtcgaggggagagcccttgcctaaaccgcaaggggcgttaccacc

SEQ ID NO: 584 - DNA, 1356 bp, Unknown
  GENOME_ACESSION: mgm4527699.3 MG-RAST
atgcagaagttatcagaagagttaaagaacacaccaaaggatacttcccaagtcctttgctctgtaaaccatcaattaaacaaagaggaaactcttagtgttgatagtatagtactgtctgataacaatcccgatgggaatcaacccgagtcaaatcggaaacagaacacgagtgtatctgtttatgtcttaaaccaaagagttgaaccgttaatgccttgctcaccaagaaagacaaaagttttgttgaaacaaagaaaagcaaaagtagttaaaagaagtccgtttacaattcaattaactattgctacaggagaaacaaaacaagaagtaattttaggagtagatacaggttattcaaatgtaggggtatcagctattacagaaaagaaagaattattatcagcaacattcaagttaagaacgaatatttcagacttattaaaagaacgctctatgcacaggagaggtagaagaaataggctttggtatagagaaccgagatggaaaaatagagccaacgcaagaaaagaaggaagattaatgccttcaattctacataaagttaatactcatatttctattattgagaagattaaaaagttattacctatttcaaaagtagtattagaaacaggattatttgatatgcaaaaaatggagaatgacaagattaaaaattatcagtaccaaaaaggcgagatgtttgggtttgaaaatgtaaagtcttatgttctttcaagagacaatcataagtgctattttaaatgcaaggattcttctaaaattgaagtacaccatattaaattcagaagtcagggcggtacagataatccgaataatttgattactttatgtgaaaaatgtcataagaaagttcatctatgtgaattggagttaaacattaaaaagcataaagaattaaaatctaccacagcaatgaatgttataaggaaaagattgttagaattttatacagaagcagaagaaacatttggttatgagacaaaagttaaaagaagagaaattgatttagaaaaatctcattctaatgatgcttttgtaatcgcaaatggaactaatcaaattagaagtaaagagtttgaaataattcagaaaagaagaaacaataggtgtcttcagttaaaccgtaaaggatacaaaccttctataaagaaagaaaggtcaaaaatacaacccttcgatttgttttgggttaaaggaaaacaatacgtatgtaaggggatgttcaactatggtaaatatatttgttatggtagtactaaattaaaagagtattttaaaatagagctattagagaagcattataatcaaggtggtttagtatggaattaa

SEQ ID NO: 585 - DNA, 270 bp, Unknown
  GENOME_ACESSION: mgm4527699.3 MG-RAST
gtcaactaccacgccttaaaggacgtggcttgtaaggtaacttacaacgtaagagttgattagggagcttaaaattttaaaagaggttttatgcagaagttatcagaagagttaaagaacacaccaaaggatacttcccaagtcctttgctctgtaaaccatcaattaaacaaagaggaaactcttagtgttgatagtatagtactgtctgataacaatcccgatgggaatcaacccgagtcaaatcggaaacagaacacgagtgtatct

SEQ ID NO: 586 - DNA, 849 bp, Unknown
  Ga0307377_10069547 JGI
atgttagtatatgttaaaaactgtaaaggtgaacctcttatgccttgctctcctacaaaggctaagagactgttgaaaagtggtgaagctaaagtagttagtcgaatgccttttactattaaactattgtttggtagtagttcttacaaacaagaagtagtagctagtatggatactggttctaagtttattggatgtgcagctaaaagtaacggtaggattttgtaccagtcagaggtacagataagacaagacgtttctatgaaaatgaaacaaagactcatgtatagaagaacaagaagaagcagaaaacttagatatcgtaaacctagatggcaaaatagatcttcttcaagaagaaaaggaagattaccacctagcatcagaagtaaaattgattctcacctaagagagaaaaagtttattgaatctattttacctgtaactagatggatagtagaaactgctaagtttgatattcatgagataactaatcctgatgttaaaggaattggatatcaagaaggtagtcaaaagagtttttacaatgtaaaagcttatgttagacatagagacagttatatttgtcaacattgtaaaggaaaatcaaaagataaagtcttaatagttcatcatattacttctagacttataggcactgattctccagataatttaataactttatgtgttacttgtcatgacgattttcatgctggtaagattaagttaaatataaaaggaaaacgatctaaaactaaacatgctactgagataggaatagttaagtcacaattgaaaaagcaatggttaggttttgaggagacttttggttatgaaacaaaatat

SEQ ID NO: 587 - DNA, 300 bp, Unknown
  Ga0307377_10069547 JGI
gtcaactaccctcccctaaagttttctttaaggagaacctatttattaggttaagttgaccagaccactaacaggagaataaaagttgttagtaaacgatacaaaagaaattagtcaccttgggatgccgtcccagttccaagctctgaggttacgaactaaacagttcttagggtacagaacagtgtttgtaacgataaaccttttgatatcaggtcgagggaaagttgaactctataattgctccaaaattatagatacacactactctgttttcagtcaggggtatactttatgtta

SEQ ID NO: 588 - DNA, 1317 bp, Unknown
  Ga0223826_10002115 JGI
atgacaatttatgtcttagacatcacaggaaaaccgttaatgccgacacacaagcccggtaaagtcagacatatgctgaacgacggcagagcaatcatcgtcaactattatccgtttacgattaagttaacgtatgtaacaacaaactacgttcaaccagtaactctcggtgtagatgctggaagcgttcacgtcggtgtgagcgcttcgacagagaagaaagaactgtattccgctgagattgatttgaggagcaagcaaatgccgaaacttatagaaaaacgggcagcagcaagaggaatgcgacgttatcacttgcgctacagaaaaccaagattcaataatcgagtctcttcgaaaaaagaaggatggttggcgccatcattgaatcatcgtgtcaattctcatatcagaatcgtagagaatgtaatgaagattcttccaatcagcaaaatcatcgttgaagttggattgtttgatactcagaagatttccaatccggaaatctcaggagaagagtatcagaaaggacagatgtctggttctgacaatacgaaagcgtttgtcagattcagagacaagaacacttgtcagcagtgtggttcgaaagaacacattgaagttcatcatatccagcatcgagaagatgatggtccagacaggccagataacttaatttgtttatgtcacaaatgtcattatgaacatcacaacaatggtttggttctaaagaagttcaaaaatataaacaagaagaatgccgtttcattgcgtgatgcggcagcgatgaatcttatcaaagacaaggtattctctaaacttaaggaacgtcattcagatattgttatttggagaacgtatggttatgttacgaaacataacagaagaaaatataacattgataaatctcatgcgaatgatgcgtttgtgatttcgaagaatttcaacgctgaacctttggattatatgttcaggggatttcaaattagaaggcataacagaaagatacacaaagacactattcttaaaggtaacaaattgaaaaagaaccaatctgcacatttggtgttcggttttacacgatttgatagagtaagatatgatgggaaagaatgtttcatatacgcaagacgaacttctggatatttcgacttgagagatatagatggtagcaaaatacacgctactgctcctgtaaggaaaatcaaactaatcaaacatgagaatagtataataattaagaaaatcaaaaaggatagtgctgattcttctgctgacgctaaaggcgtcgcagtttcctcagcagatttaatatga

SEQ ID NO: 589 - DNA, 318 bp, Unknown
  Ga0223826_10002115 JGI
gtcaccaaccggcgacactaaaaatgtcgcggcttggctcttaaatgagcggagtcgatggtgattagcctaagtgaaagagtttcaaactcttgaactacgttactgacgaaaacataggtaccaagggatgttagtcttagtcccttgctctacgtctgaatgttaaacagtcctgtccggtaggggcagtgcattcagaatacaaaaccgtcggataacattggcgcagggctgcattacagcgtcgctttagcgacgtctgcgttatcccttaattgggaataaaaattaatttcattaaaaacgactatgaca

SEQ ID NO: 590 - DNA, 1398 bp, Fermentation metagenome
ttgacaaggaggacacatagcaatacatgtattgctaatttatttaataggagaaattctatgaaatgcatttatgtaattaatcaagacggtaagccactgatgcctactaaaagattaggcagggtgagtcgttggttaaaaagcggccaggcgcattggtataaaaaccgtcgtgataccattcaatttaatcgtaaaactactaattatgtccaagaagttattcaaggatgtgatcttggtgatcacttaggaatgtccgttatcactaacaatcaagaagtttatgccagtgaaagttactgtaatggtaagcaaacgcatcgactaatgcaaaaacgaaaagaactgcgtcgaacaagacgtaatcgtttacgtcatcgcaagccacgttttgataatcgcaaaaagaaaggatacgctccttcgattcaaagaaagctagattttcaaattaaagaaattaaacgcttagatgagtttttaccaatcactaaacgtgtttttgaaggctcgaccttcgatattaacaagatcactcatcatgctcagctgcaaaaaggttataaaactacgtttgattttttgtatgatcgggatcatggctgtgacgcgctagacggtaagcattatcctaagaaaaatatggttatccaccatttagtacagcgacataacggcggtacaaacaatcctgataaccttgttttattagcacgtaaaaatcatacgcaggtaaatcataaaaacggggttttagacaaattagctaaacagcgtcagaaaaaatataagaatgcggatactcgtggagcatatttcatgaatgtgctaggtaaggaattacctaagtattttgattttgtcccaacatatggctatatcactgctaaaaagcgtaagaagtacggtattgctaaaactcatcacgatgatgcctttgtaattgctggtggaactaatcaaacaaaacgttttgatacatgcttttatcgtgaaaaacagcgtctcaataatcgttctttagaaaaattttacgatgcgcaatatcgtgatttacgtactggtgaaaaagaaaaaggtgctgttttatcatcaggtagaacacgtcgttctttaaaagatccacgcaacaatcaacgtgttttccgtgctaacaaacttaaaaagggcagaagaacgattcgtaaacagcattatcaattgcgtcctaaagatttagttagttacaatgataaaatttatcgagtaaagggcatgcagaacaatggcacgcgtgttttattaattacttctgctaaagataaatcagtagccattaaaaacgtaaaatatctgtttcatattaacggtgtttatcaaacggaaaggagaactacggcattcatctcctga

SEQ ID NO: 591 - DNA, 319 bp, Fermentation metagenome
gtcaaccactcctgactaaagtcaggagcttgtaattattacaagctcagttgattagtctaagcattaaattgctacgttactggcaaatgagttattaatcatgctacaacgagtcaaaacgttgcttagttgataactttaataggtaccttgaaacgctactccaatttcaagctctacggatacggtttaaacagagctgaagagtaaggctcagtgatcgtattagaaaaactgtcggataacattgacaaggaggacacatagcaatacatgtattgctaatttatttaataggagaaattctatgaaatgc

SEQ ID NO: 592 - DNA, 1485 bp, Unknown
  Ga0117909_1085896 JGI
atgttagtccacattatttccaaggatggtaaggctttgatgccttgccatcctgctaaggcaagaaaattactcaaagaaggtaaggctaaacctgtcaaaggaaagactggatattttactattcaattgctctatggtagcagtggctataaacaagaagttgtggttggtatagatactggcgcaaaacgagtgccaatcgctgctgttggtaacggcaaagtgtattatgcaaaagagaagatactaaggacagatgtaaagaagcagttgtctgataggtcaagatacagacgcacaaggcgaagtcgtaagacacgttatcgtaaacccagattcttaaatcgggtaaagacaaaatgctccaggtgtggtgttaataacgtgcccaagcgttggaagagtgtcaagcgcaaaacaggtaagagcaaaaagaaggtatgtaatggtagggcgcaactttgtcggcagtgtctgggtaaaaaggggctacacgagaaaccgcatgtacttgccccatcagtattaaatcgtgctttgagtattctcaatgacattcacaagttatcttctacactccctatatccagggtagttattgagatagcatcatttgatacgcagaagatgacaaacgctttcatagacggcgtcgaatatcagcatgggacgctctttggctacgaagtcaagcaatatctcttgacagttcacaagcataagtgcgcttattgcggtggattgtctggcgataacatcttacaggttgagcatatatttccacaatctaaaggcggcaccgataaggtcaataatctaactatctcttgtggggtgtgtaacgaagctaaaggaagtatgacgttggaccagtgggagggagtgttgcgtgcttctccaagcgatataaacgagaagcgattgaagaacatacctggtattaatcgacagagcaagctaaagaagggattccagtacagcgcacttacacaaagctacaagaattatttgctaagtgaactacataaagatttcatagtggaagttacctttggcgcaaaaacaaagtataatcgaactcagttgggcttgtctaaatcgcaaatcaatgatgctctcgttatagcatcagaaggtaagccagtgaagatgccagggtggtacatccttgaaaaacaagtcaagaagcgttactcatatcactacatttctcccccaaagaagggacagccaattgttaagtgtaagagagacttagagatgttcggtttccggctatgggacaaggtagagtgtaatcatccaaagaacgggaatgtagtcggatatgttcaagggcgtagaagtagcggtagctttgccatcgcttctcttgatggggaattacttataggaggtatatcctacaagaagcttaccttgctaaagaaggcggggagtaattacgttagagaaaggagacggcaattcctccccgcctga

SEQ ID NO: 593 - DNA, 326 bp, Unknown
  Ga0117909_1085896 JGI
gtcaataacccctcctgattcaaagaatcagaaggggcttgtagtggttatccctgcaagccctatattgacagcctaagttacttaggtagctacgttattctggttatcagaccccggggtgctccaccagctccgactatcattttgttgatcgcatggctctctgatggcgtctgatgcttcggtatcagacattgtaaacagtcctaagaggctctgggacagtcaaccataggacgacttagcattctaagcaagctggaataacattggcggggtggaatctaaccctatcttatataggagtgtgagacttcatgtta

SEQ ID NO: 594 - DNA, 1332 bp, Unknown
  Ga0175859_1302585 JGI
atgaaagtttacgttatcaacaaacatggtcgtcccttaatgcccacaaccccaagaaacgcaagattgctgttaaaggaggggaaagcaaaaatttatggtcgtgacccttttactatccaattaatttacggttctagtggttacactcagccgggaaggctaggaattgatgctggttatgagcatattgggtatagtgtggttaacgaaaaagaagaattgattggtggggaaattgatatgttaaaaggcatgtcagcccgattaacggaacggtcaaaataccgtcgtcaaagaagaaataggaaacgtcaccgcgcaccaagatttgataatcgcaggcgtaaagaaggatggttggctcctagtattcagcacaagcttgatacccaccacaaaataatccaaaagattgtagatattgtgccagtcaagaaaaagataatagaggttgccagttttgatattcaaaaaatcaaagacactggtattgacggcattggatatcaacaaggcgaacagtacggttttgacaatgttcgtgaatatatacttcaccgtgacaagcacgaatgtcaaaatcccagatgtaagaacaagtcaactgagcctatcttacaggtgcatcatataggtttttggaaggaggacaggacggatagaccagcaaatctaattactctttgcgataagtgccatacaccaaagaatcacaagaagaatggttttttgtttggttgggaaccaaaacttaaatcctttaagggtgaaaccttcatgaccacagtcaggtggcgcttaagcaatgaaggggaatatgaatcaacttacggttacattaccaaaggagtaagaagagattttcagatagagaaatcacaccacaacgatgcctttgtgattgctggcggtactacccaaaaaaggattgagccattaattctagaacagattagacgaaataagcgttctctagaacagttttatgacgcgaaatatattgatactagagatggttcattaaaaacaggctcagatttgtcatctggtcgtataacccgtaataaaaacaagagtggtgaaaacttaagacgatttcgaggtcagaaaataaccgccggacaacgacgaattaagaagtctcgatatcgttaccaaccgcgagatttggtgaagtttgagaacaagccttatgaggtgattggaatgcaaaacttaggtactggtgttaagttaaaagactatccaggagtcaaaaacaaggttgtacaagtaaagtttgtccagccactaagaaggagatcgggtatctgtactaggcttggatag

SEQ ID NO: 595 - DNA, 302 bp, Unknown
  Ga0175859_1302585 JGI
ctgtgacgactccacacaccgacgccctttggggtacggtgtgggcttctaagaaattagaggttcgtcattagcctcagtgactcctgatcgcaagagtcgctccgttttccagaatatataggcactccgaggatgcagggggtagcgccctgattcctagtcgcggatactgcggtcactgattaaacattcctactggcagagggttcgtgttggtgacaaaaaacctggacaaacattggcaaaggaaaccacgtcgaaagacgattctctcttaattagggatatcaataatgaaa

SEQ ID NO: 596 - DNA, 1140 bp, Unknown
  Ga0394874_0000250 JGI
atgtctaattttgtcttagtcatagatgcccaaaaacagccccttaacccggttcatcccggtcaggcgcgccggttgttgaaagcaggaattgctgctgtatttcgcagatttccctttgtcatcattctcaaacaatcctgttcggttttgagcgcgctcaagactttagagttaaaaatcgctccgggatctacaaccactggattagccttgctgcaagacaaaaaagttgtatttgctgcacagttgacgcaccgtggacaagcgattagagctaaattagaaacgcggcgcaaccaacgcatgtcgcggagaagtcgccatactcgctaccgacagccgcgatttctaaaccgcacccgtcgtcaaggttggttagctcccagcttgcagcaccgcgtcgaaacaacgattacttgggtgaacaaacttatccgatttgcacccattggctcaattgttcaagagcttgtcaaattcgagctgcaaaaattagaaaaccctgagatttcagggattgaatatcagcaaggcgaattgcagggctacgaagtccgcgaatatatgctggcaaaatgggagcgaaaatgcgctgaatgcggtattgaaaatgtgccgttacaggttgaacacatccatcccaaatcaaaaggaggctctaatcgaatctcgaatctttgcctggcttgcgaaaagtgcaatatcaaaaaaggaactcaaagtattgagcaatttcttgccaaaaaaccggatgtactgaaacgagttttgtctcaagctaaatgtccccttaaggatgcagcggcggttaattcaacacgatggactttgttcaatcgattaaaagaaacgctgttaattacctctactggacgcggtacgcgccgcaggtgtcggatagacaagtttgggttcccttgttctaaaccccgccagaattacgatattggctggcagaccggcgatatcgcgatgactgtcaaagatggggtaaagtatgttggtaaggttgtcgtgcaatccgaaaaacggttggaagtaagaactggaaaattaagaatcggcggcacgcttgataaattcgtaaaattgcactcgcaagacgggtatcaatatgccaagattgactccacttaa

SEQ ID NO: 597 - DNA, 250 bp, Unknown
  Ga0394874_0000250 JGI
agcaccaatttggagtaaatcgcagcaatctggtttatttcggctactccagaccgctgaattttgattcagcagccgttatcttcaagcgttaaagttcgcaccttgggattcgctagtcctgagcttctgcaagtccactgttaaacatcctcgattgggtaaaaaaaatgcagtggacaaagtaccgggagataacagggtcgaagcaaacattaccccgtaagggaggacttagatgtctaatttt

SEQ ID NO: 598 - DNA, 804 bp, Unknown
  Ga0007854_10018219 JGI
atgcaaagagtttttgtattagataaaagtagacggcctttgatgccctgcacggcatctagagcaagaaagcttctttctcaaggaaaagctacaatgctcaaactccatccttttacgattcttattcaagatagagaaggaggcgaggtgcaaaatattgaagtaaaaatcgatcctggaagtaaaatttcaggaatggtacttattggacactttaaaaaaaggatgacagtcatatgggcagccaatcttgaacacagaggagctactattagatcctcgctagaatctagaagagctattagacgaagtcgaagacatagaaaaacccgttatcgagcagctcgatttaataatcgaaaacgtaaagaagtatggatagcaccttcattacaagctagagtggataacatttgtcattggatcaaaagactggaaaagttagctcctatttcttccattgcattagaaacggtacggtttgatatgcaaaaaatccaaaatcctgagattacaggagagctttaccaacaaggtgagcttatgggttacgagatccgagagtaccttcttgagaaatggggtcgcaaatgtgcctattgtagcggagaacatacaaggttagaaatcgatcatattgttcccaaaagcaaaggtggaactaacagagtctctaatctcaccattgtttgtagaacctgtaatgtaaaaaaagcaaatcatcctctcgaagaatttctccataaaaaatcagctctttgcgctaagattttatccaaagcagaaaagcctttggacaac

SEQ ID NO: 599 - DNA, 311 bp, Unknown
  Ga0007854_10018219 JGI
gtcaactaccaccccctaaaggaggtggcttgaagaggtgactcttaaagcttggttgaccagactaagcatccatgtggatgctacgattacaataggtcgttaagacctaccttgggatgctactccagtcccaagctctagaagggtaagatcacgatgggtaaaggtaaagacccgaaggttttacttgccgaaagggagccggttgtaatcattgccctggaggacgttatccacaaagcgcttttgcgtaagtggagattgcacttacgtgctaaattttttttattttggaagatatgcaaaga

SEQ ID NO: 600 - DNA, 1356 bp, Unknown
  Ga0209720_1000657 JGI
atgatacatcgttggattaaacaaggaaaagctaagtttaggaaacgtaacttagttcaagtatttaaacaattcgatccagcaaaaactataccagctaaatttgtagttggtatcgatcccggatacaaaaatattggttacgcagtttataagatttataataataaaattacagagctagtttcaggtgaagtagtcaccagaactagtgagattaaagagctattagatatcagacgaatgtttcgtagactcagacgctattatcgaagaaagaatgtcttaagaaaattcggtaaagttaagtttagagctccgcgatggaagaatcgtaagaagaaaccattcgctcctactcataatcatttgattcagagtcatttgaatcttctaactaggttatttaaattagttaactttacagaaattcatctagaatactctagctttgacactcagaaattacagaatcctaatattaagaactggcaatatcagaaaggtcctcagtttggatttgaaaatgttaaagcatatgtgagagctagagataattatcagtgccagaattgtggttctggagataacttaagagtacatcatatagtagagcgaagtaaaggtggcagtgacaggtctgacaatttaatcacagtttgtgagagctgtcacaatctgattcatcaaaatggattatcttctccagcgatttcaactgatattaaaatgagagatagcggagttctgaattcatgtctgaagaagctatatgaagttctagctgacagtataactactgttaaaacattcggttacatcactagtactcttcgaaagatctaccagttagagaaaagtcacgaaactgatgctaaattaatagctttatctgatgaaaatggattagctgtagatttagaaaactgcgattattctagtagtgatctaaactataatttttatcagttcagaaggcatcagcgtagctgggttaagagatatgtagacagaaaatatatagaaacagatttttatgcaacagttgcttggaatagaagacgtcgttctgctcaagatgaggagaagccaagtcttcaagaacttaaagctgaatatcctgacgctcgcttaatagctaaacccggaaaagtcgtctatagaaagagtcatcaattaactaaattcagacccggtgatatctttagatacggaaacaagattgatgtagcgaaaggatggtcgtctactatgaatagagtaggtggtctagacatcggatacgttccgataagtaaaactactaaaatctgtaacaattcaggattagttatactacccgctaaagcgggataa

SEQ ID NO: 601 - DNA, 301 bp, Unknown
  Ga0209720_1000657 JGI
gtcaactaccacccgctaaagcaggtggcttgtaagagtcatctgcttagtggttggggttgaacaggcacgtggaagttaaagcttctgcaggatctgattaagcgttcaccctggggtgccactcccagctccaggctctgaaggtaatagctaaagttttagctagaagtcctagttgctagcaagtaggtaacgaaagctagtattacgcttaaccaagccgagggagactcacacttgatacccgatctatgggtatcgcttttaaaggtagaggtaactaaaattgaaacagata

SEQ ID NO: 602 - DNA, 1356 bp, Unknown
  Ga0177923_1152199 JGI
atgacagtatttgttatcagtaaaaacggtgaacgcctgatgcctacttcccggtttgggaaagttcggcacatgatcaaggatggcagagccgtcatttattgccacaatccatttaccatccagctgacctatgacacaaccggctacacgcagcccattgaaatttgcgaggataccgggtatcagcacataggaatcagcgtaaaaagcgagactgcagaatatgtttcggcgcaatacgatctccttgagcacgaaaaggaaaaccatgatgactgccgaaaatacagaagggctcgaagaaaccggaagcggtaccgcgccccaaggtttaataaccgccgagcgtccaagaaagaaggctggctggctccatctctgagaaataaagcaaatcggcatatcgatctaatccagaaatatgtcaaggttgctcccatcacttccatcacggttgagcttgggcaattcgatacgcaggtcctgaaagcagtgacagaaggaaagccggttccagaaggtcttgattaccaacatgggcctcagtatggcattgatactttgcgggaagcagtctttcaaagagataatcacacctgcattttttgcggaagaggattaaaaaacggagccatcctgcatgttcatcatgtctatttctggcgtgggcagcatggtaattctcttgacgaactggctacctgctgtgaaaagtgccatactcccaaaaaccataaggagggtggcaagctctggggttacaacaagaagcttcccagatacaacggtgcggcattcatgaatatcgtccgttggtatatctacaaccaggtcaaggaccttaatcctggcattgatattcacgttacttatggcgctgctacaaaacgcagccggatggatttaggacttgaaaaggcccatgtcaacgatgcctattcaatggggctatttcatcatacaaaaaggacagccaaggagtttttcgtaaaacgccgccgtaataatcgctgcctggaaaaattctatgatgcaaaatacatagatgccagagacgggaaaatcaagtccggctcccagcttggatgcgaaaggataaacaggagagagcctagaatatctgataaaaaccttcgcatttttcgtggaggaaaaaagtcaaagggtcaccgatccattagacgacagcgatatggaatacgtcccggagatatcatgctttgtagcaacaagaaaattcctgctactggggtccattgtaatgggacaagagttttagtcggtggaaaatcttacaaattggaccagatggaagttatccgacatatcggcggttgggaaaaaactgactaa

SEQ ID NO: 603 - DNA, 358 bp, Unknown
  Ga0177923_1152199 JGI
gtcaacaacccgccactaaatcaaagatttagtgggggcttgagaaacagtcccattcgactgtccctttcaagcttagttgattagcctcagttggtcggtatggcttgccagcgaaccaactacgttatcttggaatccttcattttgggaaataggcaccagtgtttggtactccacaagcccactgctctgcggtatgatctaaacatctctaacggtaggagaagtgcgtaatacaaaaacccaagataacattggcgatgtggaccacggtactgcgctgtcatcttcgcatgacagttgcgaaggccgcattattcccctcacggggagtcaggagtaaatcacaatgaca

SEQ ID NO: 604 - DNA, 885 bp, Unknown
  Ga0256405_10019152 JGI
atggtttacgtattaaatcaaaacggacgacctttaatgcctacaaaaaaccatgccaaagtgcgtgttcttctaaaacagggcaaagcaaaggtgataaacaagtgtccgtttacaattcaactgttgtatagtagcacgaactatgcacaaaaggtaactttaggtgtagatagcggaagtaagcatattggtctttcagcaaccacaaaggataaagtattatttgagtctgatgtagagcttagaaacgatattatggatttgctttcttctcgtagagaattaaggcgttcccgtagaaatcgtaagcttcgttaccgtaaaccaagatttaataatcgcagacgtggtaaggggtggttagcaccttctgtaaagcaaaaggtagattctcacttaacaatggtatcaaaagtatgcaaaatacttccaatatcaaatatagtagtagaggtcgcttctttcgatatacaaaagattaaagatcctacaataagcggtgctgattatcaacatggcgaacaattagacttttggaatgtcagggaatatgtgttattccgtgacgggcatacttgtcagtgctgtaagggtaagtctaaagacaaaatccttaatgtacatcatatagaaagccgtaagacaggcggtaatgcacctaacaacctgatcacactatgtgaaacctgtcatactggatatcataagggaactgtaaaactgcctaagacaatacatagaggaatgtcttttaaggatgctacgtttatgggtatcatgcgttgggctttgtatgggaaacttaagtctatatatccagacgtaaaacttacttacggatatattacaaacccattgcggcgggaaagcccacggttttaa

SEQ ID NO: 605 - DNA, 294 bp, Unknown
  Ga0256405_10019152 JGI
ttcaactacccaccgcctaaaggcagtgggattgtgcagtagcagtgctacgaagcaatcctaagttgaatagcctaagttctttgagaactacgttaccttggaatatataggtacttcgggacgtaatacctaattccgaacactacggactatgattaaacagttctgtgaggtaggaacagtgttgtagtcatacaaaacccagggataacattggcgaaggtatgcaaaccccttttcggagggagtaattaaaacctttatggtttttggaaaggagaatgcgtaatg

SEQ ID NO: 606 - DNA, 1275 bp, Mouse gut metagenome
atggaactaaaagacataacattcttttttgtagtagatagtaaaggtaaacccttagctcctactacaaataatagaggatttgaactattaagaaaaagaaaagctactcttattagtaaataccctctagtaattaaattaaataaagaaatagaaaatcctaaatgtaatattgaaattggtatagatgatggctcaggtcatgtaggcttatctattactcaaaaatgtaaaactaaaaataaagtagtctttaaagccaaaatagaacaacgtggagatgttaagactttaatgactaaaagacgtgaacatcgtcgctatagaagataccataaacgttataggaaaccgaggtttaataatagggcttcttctaaaaagaaaggaagaatacccccatctattaaacaaaaaaaagatgctattcttagagttattagacaactttctaaatggattaatattaatcttacaacacctattcatttagaagatgtggctattgatataagagctcttacagatgcctttaaaccttatagatgggaatatcaacaatctaatagattagatgaaaatttaagaaaagcggctattttaagagataaaaatacatgtcaaatgtgtcaatgtaaagaaggcacaaaagaagtccatcacataagggcaaggcgtttacatggagcagatactataagtaatttaattactttatgtcctaagtgccatgaatctataaaagataaagaacctctttatgaaaacttcttttatgagaaaattaaatctattggtaacattcgctttgactatgccacacatgttatgcaaggaaaaacttatcttagagaagaactttctaaaataggtgttctacaacttactaatggaggagatacagcaaataaaagaatagagtggaatatagaaaagtctcacgcaaatgatgctatctgtataataggcttaaaacctgataccactgatatttttgaatggactataaagcctattagaaaaagaaacaactttaataaaaaaacagattttgtagaaggttctaatggcattattaaacataaagatttagtttcttatacctataaagatggtaatacttatgtaggttatgtaactgctttatatcctagtgataagaaaacaaaatcagattatttaaattttcagagtaaagaaaaacattgtaagaaagtaaatgcaaagaagacaaagctcttatggagcttcagtcatctttattggctatag

SEQ ID NO: 607 - DNA, 369 bp, Mouse gut metagenome
tataaagatgtattatataatacatcttgtattgtataatttatatttattagtatttttaaaagatctcaagcctaagtgatagcaccataacgaaagttatgcaataaaagaaattttattttaaagtgctgatatgaactacgttgataagtaagctaaaaatatacctttaggtacacctttagcctaaagctctataactgccaaccaagaaacaaagttcttacattactttgataacagggaaacagatatgctcttattgacattggcaaaaaggacaatactcattaaatagtagtttctaactactaggaaaggagaggcgaaagccaaaaacttatggaactaaaagacataacattc

SEQ ID NO: 608 - DNA, 912 bp, Unknown
  Ga0114843_102905 JGI
atggtatttgtattagataggtctaaaaagcctttagacatgatttcacatgctaaggctagaatattgcttaaaaacagattagcagtagtccataaagtatatccttttactattagactaaaggacaatagttgtgtaagtaataatagaacttacactgttaaacttgatccaggttcaagaactactggagttgccactgaaatagatcacatcataccaagaagtaatggcggaactaacagttcatacaatctaactccagcttgcagaccatgcaatgaaaagaaatcaaacttatcactaaaagaatttgggaagcttatgaacaaagactattctcagctagaacctaagaaactgcctaaagatgcagcaatagttcaatctgctagaaactatatgattaaagagataactaaactggtttctaatacaacttcgtatgacgcttggttaactaaatataatagagatagactagacttatctaagcaacattactatgatgctttatcagtaggaaatatagagaactttagatttcttacagataaggtattacaaatatcagctaaaggtagaggttctaggcaaatgtgccttatggataagtttggctttccaagaaccaaaccaaaaggtagtaagttagttaaaggcttccagactggagatatggttaaagccacagttccaaaaggtttaaaaaaaggagaatatcttggtaaggttgcagttagatctagtggatattttaatattcagactaaaactcaagttatccaagatataggatataagtattgccgtcttattcaaagaagcgatgggtactcatacaattataaggagtgcgacttcctctcggctattcataaccgagtctccatcgcagattttagatga

SEQ ID NO: 609 - DNA, 270 bp, Unknown
  Ga0114843_102905 JGI
atcaattactcagtagttaactactgagcttgattgaccagactaagttgctaagaaattagcttactacgatagataagttatcacacccgcatgatgcttctccagtttgcggctctgtgtaggctctgtaagaatgcttaaaggcaggtcaacctaggaacggctctagcaagcttatctatcattgtcgaggagagactcacttccaaaagaagtgggcgataccgtagcaatacgagattattaaaagaaaggaatttactgatg

SEQ ID NO: 610 - DNA, 1362 bp, uncultured Erysipelotrichaceae bacterium isolate RUG13468
atgtctgtggcagtactatccagcaccggcagaaagctgatgccgacttcgaactacagagcacggaagctcttaaaaagcaaacgtgctgtcattgaatgctatcgtccgatttttacaatccggttaaccgaccgggaggagggaaacacacagccgattgagtatgcctgcgatacgggataccagcatgtcggcgtatcaatcaagtccgaaaaacatgagttcgtccatgcgcagtatgacatgctgagcgatgagacagagcggcacaatgactgccgcaagtgccgcagaaccaggcgaaacagactgcggtaccgtaaaccgagattcgacaaccgttcgaagaagaacaaggagatggcgccttccctgcggcaccgcaaggagaaccagatccgcttgttcgaatcgttctgcaaagtcatgccgatcacatcggcggcattcgagatggggaagttcgacactcagcttctgcaggcaattgcagacaagaagcctctcccgaaagggaaggactaccagcggggatcgaagtacctgtatcagaccgaacgggaagccgttttcggcagagatcactatacctgccaggtatgcggtaaatccgtcaaagacggcgtgattctgcatacgcaccatatcgggttctggaaaggataccgctccaaccgaatcagcaatcttctgacagtatgtgagcactgccatacggcaaagaatcaccagcccggaggaaagctctggggactggagccgaaaagcacaaatctggctccggcgacgtatatgagtaccgtgcgctgggcaatgtatcgcgatctggtgctgacgcatccggagctcgatatttatttccagtatggtgcaaagactgctgtaaccagaaagtcgctgcatcttgaaaagacacatgcaaacgatgcttactgcattgggtctctgcatccgaagcatcgaacagcagagcttgtctatcagaaaaagcgccgcaataaccggattcttgcaaagttctacgatgcaaagtacatcgacatccgggatggcgaaaagaagtccggttccgcactctcatgcgggagaaccaaccgcagggaaagcaggcgctctgataagaatcagcgcatctatcgcgggaagaagtgttcttcagggcgcacttcggttcggaagaagcgttattcatatcagcctggggatgcgattctgtttcggtctcagcgtttcactgtcaatggtgctcattgcaatggaacccgcgtaattctaaataccggaaaatcagtcaagatggcagatttgacctgcattaaaatggaaggaggatggtgcttcctccccgcccaagcctga

SEQ ID NO: 611 - DNA, 370 bp, uncultured Erysipelotrichaceae bacterium isolate RUG13468
gtcaacaaccccgcctaagtcctaacggactatagacggggcttggagaggctattacagctcttcaagcccggttgataagcctcagtctgcgtaagagccttcggactctgaagtggcggactccgttgccgtgagctacgtacgaatgctccactagttcgtacctcttgggtgcagatgctaaaaatcccctagggtaagggacgtgcatctgtagtattcaacccacggataacattggcgaagtggaccaccgcggctgcggttcttcggaaccgtaagtgcgagatgctgcatgtcttcaggaatgcagaaagcgtaagcgcccttaacggggcaggcagaaaggaggcatcagaagatgtct

SEQ ID NO: 612 - DNA, 276 bp, Unknown
  Ga0105046_10007489 JGI
atgcaacgagtattagtgctagacaagaacaaaaacccgctgatgccctgtcactcggcgcgtgcgcggcaattgctcacacaagggaaggcggcggtctttcgtcaatacccctttaccatcagcccaaatcatgcgccgcttcaaattagggcgaccgggcatcaatctcgccaaatgtgccgtgtcgataagtacggctttccacgaaccagccccaaacaagggcgcattcactatggtttccaaacgggagatatggtcaaggcgctggtc

SEQ ID NO: 613 - DNA, 255 bp, Unknown
  Ga0105046_10007489 JGI
gtcaacgaccacctccataaagggggtgacttgcgataagcaagcccatgttgaccagcctcagtctcattcgtgagacaccgttatccgggtcatgataccgacgggtgactgaaccagcccgtcgctctatcgctcaccgttaaacatgccgagggtctaggcaagtgcggtgggcatgacaagcccgaataccattggcgaggttcactttactgccgcaaggcgagcataatgaggtaactcatgcaacga

SEQ ID NO: 614 - DNA, 1293 bp, Human gut metagenome
atgcaagtagtatatgtattaaacaaagatggattaccacttatgccaacgcataaactgggtaaagtaagacatcttttaaaagatggtaaagcaaaaattgttaagcgtaatccatttactattcaactaaattatgagtgtggtaattacattcaaccaattacattaggagttgacgctggttctaaacacataggactaagcgcctcaacagaaaaagaagaactatattcttctgatgtagaacttcgtaaagatattgttgatttattatcaacacgtagacaaaacagaagaacaagacgcaatcatctaagataccgtccagcaagatttgataatcgtaaaaaagaagatagttggctagcaccatctattagacaaaagattgattctcatttaaaggtaattgaagatgtacataagattctgcctatcacaaacattattgtagaagttgcatcgtttgatactcaacttttaaaagctgaggctgaaggcaaaaccattagtggtactgattaccaaaaaggcgaaatgttaggttataacactcgtgagtatgtattatttagagataatcacacttgccaacattgtcatggtaaatccaaagataaggtattagaggttcatcatcttgaaagtcgtaaaacaggtagtaatgcaccaaataacttaatcactttatgtaaaacatgtcacgaagcatatcataaaggaaaaatagaattaaaacaaaaacgaggtgctaaatataatgacgctgcctttataggtattatgagatgggctttctacaacaaacttaaagaaatctatccaaacgtttctttaacttatggatatataaccaaatataatcgcattaatttaggtttagaaaaagaacattataacgatgcttattgtattgctggaaattttaacgctaaaccacttaatacctttatctaccaaaagaaagttagatgtcataatcgccaaatacataagtctaaccttttaaaaggcggtgttaaaaagcgtaaccaagcaccttacttagttaaaggatttagattatttgacaaagttaaatatcaaaatactgaatgttttatctttggaagaagatcgtctggctacttcgatattagaaaattagatggaactaaaatacatagttttattaattataaaaaattggaattgcttaatgcaagggaaaattttattaaagaagaaaggagcaggcaattcctctcacgccctcttaaagagggtgaagtttccttgcctacttgttga

SEQ ID NO: 615 - DNA, 300 bp, Human gut metagenome
gaagcgaggaagctgaatagtcaactacccacggttaaatccgtagacttgtaataagcctagttgattagactaaggagaaaactttaagttaatatcctacgttatataagaatatatagttacctacaaatgtatagccaagtttgtagctctaaggtatgtgattaaacagttttgatgggtaaaaacagtgttgcgtatttaaaaaccttatataacattgtcgatggctacattacaaatcgtaagatttgaattatctattaagttagatagaaaggaaagtttatgcaagta

SEQ ID NO: 616 - DNA, 1353 bp, Unknown
  Ga0209647_1002274 JGI
atgtcgtgtgtgtttgtggtggacaccgagcaccgcccactggacccggtgcatccgggcgccgcccgccggctgctctcacgagggcgggcggcggtgtggcggcgctccccgttcacgctgatcctgaagcgggccgtgccggacgcgcagccgcacccactgcggctcaagctcgatccgggcagccgcaccaccggcctggcgctcgtcaccgcatcgccagcggcaccgcctgctgacgaggtatcaatcgggcgggtggtgtgggcgggggagctgacccaccgggggcaggccgtccatgagaaactggtaacgcgccgtgccattcggtgcggccgccgccagcgccacatgcgctaccgcccggcgcgcttcgccaatcgtcgccggccggaggggtggctgccgccgtcgctggagagccgcctggccaacaccgagacctgggtgcggcgcctctgccgcctcgccaacgtcgtcgccatctcgcaggagttggtcaagtttgacacccaggcgttgcagaatccggagatcagcggggcggaataccagcaggggacgctggcggggtatgagctgcgggaatatctgctggagaagtgggggcggcgctgcgcctattgccacgcgacaggcgccccgctccaggtggagcacatcgtacccaaaacgcgccctggcggctctgaccgtgccagcaacctcacgctggcctgcgcgccgtgcaaccagcgcaagggcacgcggaccgccgaggagttcgggcacccagaggtgcaggcgcaggcccagcggcccctgcgcgatgccgccgccgtcaacgcgagccgctgggcgttgtttcagcggctgcgggcaaccggcttgccggtggaaacaggtaccggcgggcgcaccaagtggaaccggacgcaacgaaacctgcccaagacgcactggctggacgccgcctgtgtaggggcgtccacgccgcaacacctgctggtggcaggcatacgcccattgacgatcaccgccacgggccggcatgcgcgccagatgcgccgcatggaccgctttggcttcccgcgcaccggccccaaggccaccagcacggtaggggggctgcgcacgggcgatctggtgcgggcggtggtgccggcgccgagcgtgaaggctggcacgtacgtagggcggctggcggtgcgtgccagcggcatgtgcaacatctcgacggcccggcagggtgtggtgcagggcatccatgtgcggcactgccgcccgctgcatcgcagcgatggctacggctacggctacggctacggcgatggggcatcccatcacactgaaacagaggcgcgttga

SEQ ID NO: 617 - DNA, 282 bp, Unknown
  Ga0209647_1002274 JGI
gtcagggaccccacggctgaagccgggggcgtgtgctgagcacgcccaccctgaccagcctcagctctgaaaggagctccgataccggcgaatgcataggcaccggcgggtggcacctcagcccgccgcgctgcggggcacggttaaacaggtccacggggtgacgaccagtgccgtgtccgaagaaaggaaaccgccggatatccttggcgaggggaccattacccgcgcaagcggaggcccacaagggcagcaagatcggagtcgcgttgtatgtcgtgt

SEQ ID NO: 618 - DNA, 420 bp, Unknown
  Ga0401364_0036777 JGI
atgcaacgtgtactcgtactagataaaaacagagagccgctgatgccctgccacccggcgcgggcgcgggtgtttcgtcgctacccgttcaccatcatcatcacagatcgggaaggcggcgacgtgcaacctgttgccttcaacgttgacccaggcagccgcacgtcgggcctggcgctgttcaacgggttcaaatcatccggcatgccgctggaaacgggaacaggcgcacgcacgaaatacaatcgccgtcgccagaactacccgaaagcccattggattgacgcggcctgcgtgggcgaaagtggcgcatgtgtgtacatcgcatccgatcacgcgccactgctcatcaaagctaatgggcgtcaatcgcgcttgatgtgccgtccagataagtacggctttccgcgcacgaaggcc

SEQ ID NO: 619 - DNA, 261 bp, Unknown
  Ga0401364_0036777 JGI
gtaagcatccccacgcctgaaggcgggggcttttaacagcccaaatgcttaccagcctcagcccttcgggggctacgttacgggcgaatacataggcactccggggtgacgccaccagccccggactctgcggtgagtggttaaacaggacggttgggggacaacggcccgtgctgctcacatcaaaccgcccgataacattggcgaggtggacgttacccgcgtaagcggagattagaggggtaactctcaatgcaacgt

SEQ ID NO: 620 - DNA, 1389 bp, Proteobacteria sp.
ttgtggcgagtaccacgttgtggggcagacacgacaagcctgttgaacattgtcgaggcaaacatgacccgagtaatcggagagaccatgtccacctgtgtgttcgtcctgacgactgatcatgtcccacaaacccccgtgcatcccgctgtggcgcggaagatgttgacggctagggccgcggcagtgttcaagcgcttccctttcaccatcatcttgaagacggcagaggccgcccaccttcccgtgcacacgcatcgcctgaagattgaccctggcagcaagaccacgggactggcgttgctcgatggccccaaggtcgtctgggcggcagagatcacgcataggggccaacggatcacagatgcgctgctccgtcgacgcgccctacggcgtagtcgccgccaacgccagacacgctaccgccaagcgcgcttcctcaatcgcacccggccagcgggctggctgcctccatcgctgcacagtcgtgtggcgaacatgatgacctgggtgcaacgtctgcaacgactgtgccccatcgtggcgctgagtcaagagctggtgcgttttgatgcgcagctcctgcagcaccccgcaatcagcggcatcgagtaccagcacggcacgttggcgggctatgaggtgcgtgagtatctgttggagaagtggggccgtgcttgcgcctactgtggcgcgaccgacgtaccgcttgaagtcgagcatatcgtgccgaaagtgcgtgggggctcacatcgcgtcagcaacctcaccctggcctgcgtgtcctgtaatcagcagaaaggcagccagacggcgggagagtttgggtttgcgaagatacaggcgcaggccagggtgccgctcaaagatgccgccgtcgtcaacgccacacgctgggcgctgtatagtgcgttgaaaaccactgagctgccagtcgaaacaggcacaggggggcgcacgaagtacaaccggactcgccgaggcattcccaagtctcactggagcgatgctgcctgcgtgggcgccagcacgccagaggcattgcatgttgccggtgtacaacccttgggtattcgggcgatggggcacgggaccaggcagatgtgtcgcgtaggtgcccagggcttcccgaaggcgcaccgcacgcgccagaagcagtactttggtatgcagattggcgatatcgtcaaggccagtgtcccccagggcaagtatgccggcacatggaccagccgcgtcgttgtcaagaacagtggttggtttgacctggttatccatggcaaaaaggccagcgtgcatcacaagcattgcacacgcctctggtcgtcggatggctatacgtacaccctgcctgctggtgcaggcaccgccgtttcctccccccactga

SEQ ID NO: 621 - DNA, 249 bp, Proteobacteria sp.
gagtgagtcgacgtactcccccgactgaagtcgggggactcttaggagtcggtgtcgagcagacatagtgccgcaatgcgctccgttcagcaggtcacgataccctggaatgcgtgccagttccaggctctatcgtctgtccttaaatagttgtggcgagtaccacgttgtggggcagacacgacaagcctgttgaacattgtcgaggcaaacatgacccgagtaatcggagagaccatgtccacctgt

SEQ ID NO: 622 - DNA, 507 bp, Unknown
  Ga0137390_10046836 JGI
atggatgctcgtcgcgctcaccggaagagccgtcgagcacgacaatggtatcgtcctgcacgcttcgccaaccgagctgcaagctcgcgcagggggagaatcccgccttgcatcaaaaccaatgtcgaagaggtgatccgggttatcaagcggctgcctttgccgatcagccagatcatcatcgaagatgtccaggtggatatcgcgcggctgaataatcctgagctcaaagggagccaatatcaagacccgacacggctggatgagaacctgcgcctcgcctgtctgatgcgcgacggctatgcctgtcagcactgcgggaaacaccacgttcgcctgcaagcgcaccatctggtgtatcgagaacacggcggaaaagatacgctgaccaatctgctgacgctgtgtgaggcttgccaccagaaggtccatcaggacaagctcaccttacaggtgactggtgtgagtgggcatctcgaccagggagcctacttctgctctccctaa

SEQ ID NO: 623 - DNA, 237 bp, Unknown
  Ga0137390_10046836 JGI
aatagctgctaaaaatctagcgttttgttacgccgggttcatggagctaccagcgggcttcttgggaagcagcagttgggatggtcatgacaccaccagatgtggttccagtcgggtgcaactgtcggtatccattaagggtagcggaaacgtgaaggtgtggatactgcaaaaagctctctcaacagccgcgaggagcatttcactctgaaaggagggcctagagccaccatgtat

SEQ ID NO: 624 - DNA, 1161 bp, Unknown
  JGI11876J14442_10022172 JGI
atgaatcgtgttccagtaatcagtcaagaaggaaagcctctgatgcctaccaagccgtctagggctagacggtgggtcaaagaaggaaaagccgtggggaagtggtcagacctgggcgtctattatgtccaactaactacaccaccatcggctgaggaagcacaaccaatcgccgttggagtcgatccgggcaagtcttattccggtgtcggtatccagtccgctaaatgcaccctgctacaactgcatcttattcttccgtttgggcgggtcaagaaacggatggaaactcgcgccatgttacgacgggggcgacgagggcgacggattaaccgggatgtcccattcaagcagcgtaaccatcggcaatgcaggttcgataatcgcaaacaatgtaagcttcccccatccattaaagcctcacggcaactggagttaagggtagttacggagttggtaaacatcttcccggtggcagcgattggttatgagcaggttaaagccgacatagaccagactaagcgcaaacgcgccaagtcgggcaagggcttctccccggtgatggttggtcagaattgggcaatatcccagatgggaaaaatcgcccctgtctacgtccgacatggttggcaaaaggatgggaacggtacatcccaactccgaacccaactagggctagagaaggataaaacgaataagtccatagctaaaccggagacccacgcagttgatggagtggctttagcttgtgggtatttcatcaaatatgtcccgttcactggctctaactcccatggctacacccacaagggtggcgttaccgtgaccccttccccgttcaaaattatcacccgtcctggtgcggtgaagcgggggaaagagtatgggtttttccgtcgccaattgcactttgaagtaccggataaatctggagtcaggaagcgcaaaggcggaacaatcacaccatttggagcaaggattggtgatttggtcagagcagagaaagctgggaagtcttacatcggctacgttggtgggtttaccgataccaaaaagtctcagaaggtttctgtttgtgactatacctggaaacggattgggcagtttgctcctagcaaagtcgagttaatcaggagaaataacggtctatgcgtagcgtaa

SEQ ID NO: 625 - DNA, 212 bp, Unknown
  JGI11876J14442_10022172 JGI
ttcatgaaccgcgccttacttcgtgaagacgcggattggcagagataacctgctccgaagtcatgaatagggcatgagttggtaggggataatcacttccgaacgcttctctagttcggactccatgtaggtctaggaatctctaggcactgggtcattccaggacacacccctaccaatgccttaagagacgaaaacattacacgagtgga

SEQ ID NO: 626 - DNA, 1353 bp, Unknown
  Ga0209616_1000698 JGI
atggtatttgttttagacaaacataagaaaccgctaatgccgtgttcggagaagcgcgcgcgacaactattgcaacgcaaacgtgcagtagttcacaaaatgcagccattcacgattcggttaaaagaccgcatagtagagaaaagtcaattgcaaccacttagattaaaactagattcaggcagtaaaattaccggctttgcggtgctccgggaatacggcacagagaaatctgtggcaattctgatgggagaactgcatcacaagcctggaataaagaccggtttagataacagaagagctcttcggcgcagccgtcgaaaccgcaagacccggtaccggaagccaagatttatcaatcgcacccgtcgacaaggttggctaccgccatcgttgcgggcaagagttaatcaaaccctaagtgttgtaaccaagttaagaaacgtgctaccgataatcacaattagcactgaacatgtcaaatttgacactcagctcatacaaagcccaaatatatccagtatcgaatatcagcagggcgaattgttcggctacgaagtcaaagagtacctgctggaaaaatggagacataggtgcgcctactgtcacgaaacaaatgtacctttacatgtagaacatgttataccacgaaatcctaaacgtggttgtaaaggcacaaaccgcatatccaatctggccttggcatgtaagccatgtaatgatgcaaaaaacaacctacagcctgtagaatggttaggacaattaatgtgcactaaaaaagctatcgaccaaaagcgggcaaaaaacttgcctgaagtactaaaacagctaaaaacccccttgaaagacgctgccataatgaacataacccgatgggagctattaaattgccttaaaaaacttggcctatccgtagagagcggcaccggcgcaaggacaaaaaagcagcgtattgagcataaacttccaaaaacccactattatgacgcttgttgtgttggccctagtactccgcaaaacctcgtaactttacaaaaatatgtactaatttggaaagcgataggcagaggcacaagacagatgtgtaacacggacaaatacggctttccaaaaggccacagacaaaacaaaaagaatcatttcggttttcagacaaacgatatggtcaaagcggatattcctcgcggtaaataccagggtaatcacgccgggcgcgttgcagttagaactagtggatattttgatattaaaaatattactggcaaccgtatttgtcaaggcatcaaccacaaatattttcaattatcgcaaagagctgatggttggcagtacgaaaaaataaaaataacatag

SEQ ID NO: 627 - DNA, 270 bp, Unknown
  Ga0209616_1000698 JGI
gtcatagaccccacgcctaaaggcggaggcttgaaaaagcccaactatgaccagcctaagcccgccggttgaggcggactacgttgggaaggtgcatacccaagaatgcttctccagttcttggcactatggaacggacgttaaaaacgagcaggggcacagcaagtggtgcgttcgttgtagtcaacccttcccaacattggcaaggagagacgggataaccgcgttactagccccttacggggctccgaaaggagtagttagtttatg

SEQ ID NO: 628 - DNA, 381 bp, Okeania hirsuta
atgtccaactcaactaattatgtattcgtgcttgacgcgagtaaaaaaccattaacaccatgcaaacctggcatggcaatgctgacgaatcaacccctaatggtaacagcaatgggacatggttgcaggcagatggtacagatggacaaatatggttttccccgcaagggttatcaggctaaaaaacctgtaccaggttggaaaactggagatatgatcaatgtcgtcaaaggcaaaaacattggattaaagggagtcaggattaaaactgtcagaagtaaaggtaattttgacatccgacatggggataaaatcttgtctgtatctcgaaatcatatccaacccattcacagacgagatggatacaattactcgttttga

SEQ ID NO: 629 - DNA, 260 bp, Okeania hirsuta
tcgaagactaaccacaaatctaatcaaagcgctcaaatcgcttaaatggttagtccagcctacttagcaataagtaaacgttattttggtcacaatacgtcagaatgcgtggccagttctgacctctattgtttggcattaaacaggtaaagagatttgaaaaaccagtgtgtcgaacttaacaagccaaaataaccaggcgaggccaactttacactttttgtaggagggacgcaaaaatgtccaactcaactaattat

SEQ ID NO: 630 - DNA, 255 bp, Okeania sp. SIO2H7
atgtccaactcaactaattatgtattcgtgcttgacgcgagtaaaaaaccattaacaccatgcaaacctggcatggcaatgctgacgaatcaacccctaatggtaacagcaatgggacatggttgcaggcagatggtacagatggacaaatatggttttccccgcaagggttatcaggctaaaaaacctgtaccaggttggaaaactggagatatgatcaatgtcgtcaaaggcaaaaacattggattaaagtga

SEQ ID NO: 631 - DNA, 260 bp, Okeania sp. SIO2H7
tcgaagactaaccacaaatctaatcaaagcgctcaaatcgcttaaatggttagtccagcctacttagcaataagtaaacgttattttggtcacaatacgtcgggatgcgtggccagttccgacctctattgtttggcattaaacaggtaaagagatttgaaaaaccagtgtgtcgaacttaacaagccaaaataaccaggcgaggccaactttacactttttgtaggagggacgcaaaaatgtccaactcaactaattat

SEQ ID NO: 632 - DNA, 1185 bp, Unknown
  Ga0256832_1033259 JGI
atggaagtttttgtaattaataagcatggcgaaacattgatgccatgtagctcaagaaaagcaagattattgcttgaaagtggcaaggctaaggttattcgccgtagtccatttactatccaactaattcatggttcaacaggttataagcaggatttaaccttaggtgttgatacgggtcattcagaggttggattatcagttgtatcaaagaccaaggaggtattttcagcagtagcgaagatgcgtaatgatatttcatcgaagatggatacaagacgcatgtatagaaggcagaaaagaaacaagcttagataccgtaaaccaagatttttgaaccgctctgccagtacaaaaaaaggacgtttagccccatctgtacaatggaaagtggacgctcatatcaatttaattaatcaacttaaatcattactaccgataaccaaggtggttttagaaacgggtacatttgatatggctaagataaagaacccaaacataacaaatgagcaatatcaaaaaggcgttcaatatggttttgagaatgttaaggcttatgttttaagtcgggatggctatcaatgccagagtaaaaagaaaggatgtagcgacagattacaagttcatcatattaaatatcgctctaatggtggttcaaatgcacctaacaacttgattactttatgtgaaaaacatcataaagcattacacgctggcaagtttgagctagatattaaatctcataaaagcttaaaatcagcaacgactatgaatattatccgcagtcgattattacgctattttccagaagcgattgagacatttggctacatcaccaaagcaaaccgctatcagcataatattgaaaaaacgcatactaatgatgcgtttgttattgctggtgggtcaaagcagaagagagcagaagaaagaaccatccactttaagcgtaaaaataaccgttcattacaaaagaaccgaaacggctacgcccctgctattcggaggcaacgatatccgattcaaccaaaagacttggtcacatttgagggtagacaatatcaggcggttgggatgcaaaacaaaggggcttacctgaaaatgacagatggattgagaaccatcgttaagtccgtgaaaaaaattgaaatagtgtttcatcaaaaaggtgtgatttacgtatga

SEQ ID NO: 633 - DNA, 286 bp, Unknown
  Ga0256832_1033259 JGI
gtcaactacccctcagctaaagacagaggggcttgagtcgtgagatttaagataggtcttcggattgaataggtgattaggctaagttcctcgagaactacgttgttttagttatgacacccttggatgcctcccaagtctgaggctctgtctccaagtattaaaagacctcaacgggtcggtgtgcttggattgacaagcttttacaacattgccgatgggaatcaacctcgcaagaggaatcgttcaattttaacgattaaattttaaaggttttaaaatggaa

SEQ ID NO: 634 - DNA, 1278 bp, Unknown
  Ga0105041_100006 JGI
atggcagtttttgtactaaatacggataaatcccccttagctccttgttcagagagaagggccagaaagttactagaacagggaaaggctgccatatggctacatagacctttcacgttgatcctaaagtctgtggctagttcacctgcagctgcccattgtcctgcaattgagctacgtatcgacccaggtagcaagttcacaggattcgctctagtcaacttggtcacaggtgcagctgtgcactgcgcagaacttcaacaccgaggttacaccataagttgcgacctgactcgaagatcgcaacttcgccggagccggcggtccaggaaaacacgctaccgaccggctagatttaataatcgaactaaacccgaggggtggctcgcaccatccctcgaacaccgtgtcttgacaacgttgtcctgggtaaaaaagtatttgagactatgcccaatacaaagtatcgccgtagaatcggtaaaatttgatacacagaagttgcaaaatccagaaatatccggagtggaataccagcgaggcgaactgtttgaatacgaagttcgtgagtatgtattcaacaaattcaatcacacctgcgtatactgtaaacgctctgctgtaccgctgaccattgaacacgtgaccccaagatctttagggggatctaatcgagtcagcaacttagcggctgcctgtagaacgtgtaatcagaaaagaggtaataggcccctggaacaatttacggacgccgaaacaatcagcagaatcaaaaatctgacccggtttccactgaaagatgcggcggccgtaaactcaactcgcaatgctctagttaagcagctatcgtctataggcaaacccgtgtcgtgctggaccgggggaagaacaaaatacaatcggactcaagctgaactgacaaagacccattgctacgatgccgcgtgtgttggggacaggcctgccaaaaaagtaccaaaagtttggttaacgatcaagtctatgggcaggggtaatcgccagatggtggctaacgacaaatttggcttccctaagaagcaagctcctcgacgaagatctaagagcgtccatggcatgtgtacaggggacatcgcaaaaacccctgttggtacagggcgcataaccggtgctagaacaaaaggaagcttttccctgaaagtaaagggaaaattggtatctatgacaccccgtaaactaaaagtggtacaaagaggcaacgggtacgagttcggtcaatcctgcgcagaagctgaatga

SEQ ID NO: 635 - DNA, 382 bp, Unknown
  Ga0105041_100006 JGI
accaagccataatcccttcctctttctctaccctttgcaacaacctagcccgtggcaggggtacacacggactcctacagccataatcccttcctctttctctaccctttgcaactcgtcccaaaaaactctttgactttacgcgatattacagtacactctgcgagaggttaattgtgacccgactcagtttgaggtaactcaagctacgtactcgaaaaaccaaagactcacctaagggtgccctaccagcctttagctctgtgattcggaatcaatgaccgcttgcaaaggggcaggcgtaatgatccggaatcggtaaaatcgagatacattgtctaggtagacattacaaggccgttattggcattttattatggca

SEQ ID NO: 636 - DNA, 597 bp, Unknown
  Ga0370539_00069 JGI
atgtctaactttgtctttgtagtggataccaatcgccaaccgctctcactctgtacagccgggatggcaaggtcattattaaaagcgggaaaagcagcggtatttcgccgctatccctttacgattattttgaacaaggcagtggtcactgagcacttcgacaagctcagtgttccaccttgccgaagtgtggtcactgacccttcccttcgacacgctcagggcaatgcgactgcccttcggcaagctcaggaaccacgctcaggccgaagtgtcgattcgcttgaagtgctgacctcaaaaccgttgctgattgcggcaaaagggcatggaacccgccagatgtgcggcactgataagtatgggtttcccactcggcatcgctcacggatgcagattcataaaggctttcagactggagaccttgttgcagcaacagttacaacaggtaagaaaatcggcttctatgtggggcgggttctttgccgcgcttctggcaattttgatattgccacttcatcgggaagagtggctggtattagccacaaatattgccaagcaattcacaaaaaggatggttactcctatggattctga

SEQ ID NO: 637 - DNA, 236 bp, Unknown
  Ga0370539_00069 JGI
gtagactgcccgattctagcgggatacaagccacaacatgaccagcctaagaccttcgaggtctacgttttcacgcgtcatgatacctacaaatgcgtcgctagtttgtagctctatcgttggttgttaaacatctgtagtgggttaaggaagtgcagccaacacaacaaaccttgaaaaccttggcgaagcgaacgttacgagcaattagaggagacgcaacaatgtctaacttt

SEQ ID NO: 638 - DNA, 999 bp, Okeania sp. SIO4D6
ttggtagctgaagaaaatcaaggcttgcaattaaaaattgaccctggttctaaacaaacaggctttgcaatggtcacccaaagtgaagaagttatctttgcaatggttttaatccatcgtggtcagcaaatcaagaatgctttggaacgacggcgaactcttcgtcgaggtcgtcgtcatcgaaaaactcgctaccgtaagtgcagatttttcaatcgcaaacgaaacaaaggatggctgccaccaagtttgaggcatcgggttttgatatcatgtccgttggggcgcgtttgtgtaaaagttagcgtggatatctacaggaaatttaagtttttttcttgctcaattgccttcctgtttgttgcctgttgcttgttgcctgttgccttcctgtttgttgcctgttgcctaccttttctatacaataccgatgctaccggacatgatatgactgtagaaacttgggttaatagactttgtaaactaagtccgataagtagtttgactatggaattggtcaagtttgacacccagaaaatacagaacccagaaatttcaggagttgaatatcaaaaaggggaactatttggtgatcatgtccgggagtatctattagagaaatggggtcgattatctgctgattgtggggcaatagatacgcccttagaagttgaacatatagttccacgctcaaaaggtggtagtaatcgggtgtctaatttagccatagcttgtcatcaatacaaccaaaataagagtgctatggatattcgggaatttctcgaaaataaaccgtctatactagctcatgttctaaaggttgccaaaacgccattaaaagatgctgctgcagtcaacacaacccgcactcaaatctttgaaactttaaaagcaaaaggtttgcgtgtgattaccggtagtggtgctggtactaaatataaccgttgtcgcttgaatttgccaaaagaacattggtatagatgctgctggcgttggtga

SEQ ID NO: 639 - DNA, 261 bp, Okeania sp. SIO4D6
tttaggactaaccacaaatctaatcaaaacgcaaattttgtgtttaaatcgttagtccagcccacttttttcaagtaaacattattttggtgacaatacgtcgggatgctaggccagttccaacctctattgttcggcattaaacagccaaagagatttgaaaagctagtgtgccgaacgtaaaaagtttaaataaccgggcgaggccaactttacatctgaagaaattggtagctgaagaaaatcaaggcttgcaattaa

SEQ ID NO: 640 - DNA, 1383 bp, Acidithiobacillus ferrivorans
atgctgaataaagtgtttgttttggacacgcatcgaacaccgctcatgccctgccatccggcccgtgcgcgggagttgttacgcaagggcaaggcgtcggtcttccgtcgctttccattcacgatcatcctgcgggaacgggttggcggagacaggcagaatatcaccgccaaatcggatcccgacagcaagacgaccggcctggcgttggtagcggcgttcaagcgaggactcaccgtcatatgggcggctgaactggcgcaccgcggtcagactatccgtgccgccctggagaaacgcagtaatcagcggcattcccgcaggaaccggaaaacacggtaccgcgccacgcgtttcgatcatcgcactcggtcggcgagatggttgccaccatccattgagcaccgcgtcttaacggtcatcacctggttcaaacgcctcatgcgctgggcgcccattactgattccagcatggggcgggtgcgcttcgacatgcaggctatggagaactcggagatatccggcgccgagtaccagcaggggactttgttcggttacgaagtgcgggagtacctgctggagaagtggatgctgacctgtgcctattgcgatgcccagaatgtaccgctcgaaatagaccatgttcacccgcgcagtatgggcggcagtgaccgggtgagtaacctggcgatagcctgtcacgattgcaaccaggcaaaggacaatgctcgactatcggcatttttgcagacggacaaaggcagacagacaagacagcaggtttctgctgcagtatatgctggcaacgaccccaaaaagcgcgcggagcgggaacgtcacgagtcgaactggctggagcgggtgctgaagcaggtcaaggcaccattgcgggatgccgcagcggtcaatgtcacccgcaacatcctgttcgagcgtttgctggaactggggttgccggtggagacggggtccggcgggcgcaccaagtttaaccggagtcagcagcattatccgaaagcgcactggatagacgcggcttgcgtgggtgaatccggagcttcagtttgcttgaatcttgaattaaaacccctacagatcaccgccaccggtcatggtcgcagacagatgcaaaacatgacgaagaaagggttcccgagaggaaaggcaaagtcccggcagaagacgtattttggctttcagacgggagacatggtgcgggctattgtgccaaaagggaggttcgctgggaaacatgttggccgggtggcgtgcaagaaatcaggaaacttcaaactcaaggtcggcgggaaagagttggatggtgtttcatggcgtcactgcactccggttcatagaggtgacggctatgcctacacacattga

SEQ ID NO: 641 - DNA, 263 bp, Acidithiobacillus ferrivorans
agcgtcatgaacaccatggataaatccaggggcttgtaggagccctgattcatgaccagcccgagaaagctgaaaggcgatctacgttcaaggtgtcatggcactccgggatgcttgccagttccggactctgccgttgccaatcatgctgtcgtacctgggggtatggcgaaggcgggcaacatgacaagcaccatggacatgggcgaggcacacgttaacggcgcaagccgatatttacaggagtaatccttatgctgaat

SEQ ID NO: 642 - DNA, 1254 bp, Unknown
  Ga0209318_1005124 JGI
atgacaaataataaaataaaagaatatagttttgtattggataaaaataataaaaaattatctcctacacttgttaataatgcttggtatcttataagaaaacaaagagcaatattaatttctaagtatccaatggttattaaaattaaaaaagaaattaaaaatgatgaaaataataatgataaatcagagtttgtttgtggtatagatgatggttctattcacgttggaattgctataattcaaaaatgtaaaaataaaaataaggttgtatttaaaggtattattgaacaaaggcaggatgtaaagaaattaatggaattaagaaaaggatatagacaataccgtagaaaacataaaagatatagacctgctagattcaataatcgttcatcttctaaaagaaaaggtagattagtaccaactattaaacaaaagaaacaagcaatattaagagtagttaatcaactaaataaatggatagatatacataaaataatattagaagatgttaaaattgatattagagcattgcaagaaggtcataaattatataaatggcaatatcaaaaaagtaatagattagatgagaatttgagaattgctactttaatgagagataattatacctgtcaagaatgtggtaagaaagattgtagattagaagcacatcatataattgctagaagattaaaaggttctgattcaataggtaatttaattactctttgtgatatttgtcatgataaaactgaaggtaatgaagaattatttattgaaaaatatcaaaataaaataaaaggtaaaaatattagattcgattatgttcaacacgttatgcaagggaaaaattatttaaaacaggaattaagtaaaatagcagaattagaattgactataggaagtgaaactgcaaataaaagaattgattggaatattaataaatctcatagtaatgatgctattgtgatttgtggatttaaacctgatacatgtaatataaaagaatggattattaaacctatgagaagacaaagtaaagcaaaaacagataatgtattaggtataaaacatagagatttagtttcttatacatttaaaaatggagaaacacatattggatatgttacagctttatatccagaattgaatgcattaaattttcaatcaaaaacaaaacattgtaaaaaagtaaatgtgaagaaatgttatttactttggaaatacaacaaaatttattggttgtgtgcataa

SEQ ID NO: 643 - DNA, 305 bp, Unknown
  Ga0209318_1005124 JGI
tagacaaatgtatatagtagtggacatatatatatctattatatacagactattgagtgtgtttcaagcctaagtgagtaccactaacgaaagttatttgtacgatgaactacgattatataaatgctaaaaacacacctttagatgtaatcttcagtctattgctctgtgagtacaaaggatgaccgacttctaatgtcctgaagtcaaacaccgaaatacatgtgcattatattgtctttggcaagaagaaaaattctccgaaaggatggttagtcagaaatgacaaataataaaataaaaga

SEQ ID NO: 644 - DNA, 1437 bp, Unknown
  GENOME_ACESSION: mgm4743560.3 MG-RAST
atgcagaaaaacaaaacagtactggtaatcgggaagaacggccgtggccttatgccatgcacaccaagaaaggccagaattctccttaaaaagaagaaggccaaagtagtaagaagaacgccgttcacgatccgattgctgtacaagacaggctgtgcgatacagccaacaacgctgggcgtagatactggttcccagcacatcggcattgccattgtttcagacgacattgtctttagcaaaagcgagtacgaactccgctccacaatggaaaaacggaagctgatggaaacaagaaaacagtatcgccgtggcaggcggtatcgcaagacacgataccgccacccaaagttcctgttccataccaaacggacatatgtggaaaagccaatcaagcggaacagtcatctgacacactggaagaaggaaactgtttcctgtatgtcaagccgtcagacaggctggcttccgccgtccgtgcagagcaagtgtgatcatcacattcggattatcaaccgctatatcgaagccctgccgccaagcacaagagtcgtaattgagattggccggtttgacatggcgcacatgctgaatccagatatccatggtgaggagtaccagcacggtctgctgtatgagtttgagaacaagaaggcttatctactcaagctgtacgactacaagtgcccgatttgcagtaagaaatttggctcaaagaggtctgacggtacaactgtcaaagcatgtatgcaccatgtcctgtaccgctcaaaaggcagtacggacaatgccagtgttctgattcctgtatgtgatcattgccacacggcagaagctcatcaggaaggcggaacactggacaaattgcagaaggctgctgccaagcagaacaacggtatcagaggcctgcgtgatgcaactatgatgaacgttgttgccaagcgtcttaggatagcgtttcctgatgcctgctacacctatggcaacatcacgcatgccgacagagaaatgatgcgtttagagaagagccatgctaacgatgcggtagcaattgccaagcatcttgatataagggtattcggcgactacacaatcaatgattgcgattatacgactctgtataaacaggttcgcaagaagaagcggtcactgcatgaggctaatccccgcaaaggcagaaagcagccaaatcgtgaggcaaaacgcaatgcaaagaatacaaaacagcggtttggcatctgtctgtttgacaatgttcgctatgctggaaaatcaggcgtagtaacaggcttcaactcttctggatgcagagcaacgttgccggacggcacatatcttggtgcgactgcagcacagaaatcaccatcattgcggccatcgcaagttgtagttctgcatcataacaacaactggcttgaaaggaggctagtcatatga

SEQ ID NO: 645 - DNA, 254 bp, Unknown
  GENOME_ACESSION: mgm4743560.3 MG-RAST
acaagtaaccgagcaagtcaggacttccagtcctgacttgcgaagttgcaagtagagcacgcgtaagagcgtgcagatgactagcctcagcagagaacacaacggctctgctatgtccgcaatgtgatgatgcaaaactacgatgccctaatagcgcagcatccaggcaacgtataccgcacaaacgagaatgtgcatgcgacctgatttccaagcattgcgaacattggcaaagggcaactgtaagtaactgg

SEQ ID NO: 646 - DNA, 888 bp, Unknown
  GENOME_ACESSION: IMG_2199352033_$F_2199352033  JGI
atggctactgagggcagagtattcgtgctagacacaaaccgcaaaccacttgcgcctaccatgcccgcaagggctaggcgcttgctcaatgcaggcaaggctgccgtgtttaggcgcgtgccattcacaatcatcttgaagcgcgcggttgagcttgatccacagcccgcgattgaattcaaggtcgatcctggtagtcgcacatcggggcttgccctcattgggaatttccccaagcaagggcgggttgtcctgtgggcggccaatctgcatcaccgcgggcaggctatcaaggacaggctcaaaccccgccgctcacttcgccgtagccgtcgtgctcgcaagacgcggtatcgtgcaccgcgatttgataaccgaacgcggccgaaaggttggttaccgccgtctttacaatcgcgcgtgcttaacgtcgcttcgtggtttgagaagctacttgatagggcgcagattactgagtgccacatcgaaaccgtgcggtttgacacacaagcattgcagtatcctgagatatccggagttgaatatcagcaaggcgagctcgcgggtcacgaggttcgcgagtacctgctagaaaaatggcagcgcaagtgcgcctattgcgggaaggagaatgtgccattggagatcgaacatattaacccgcgttccaatggcggatcaaaccgagtgagcaatttaacgcttgcttgccatgcgtgtaatgagaagaagagcaatcgcgatgtgcgagagtttctggagaaaaagcccgatgcgcttaagcgcatcttgacgcacgctaaagcaccacttaaggatgccgctgcagtaaatgcaacgcgctacgccatagggaatgcaatgcgcgctattgggctaccaacttcg

SEQ ID NO: 647 - DNA, 275 bp, Unknown
  GENOME_ACESSION: IMG_2199352033_$F_2199352033 JGI
ctcgcacatccatgtgttcgttcgctaatcattttcgtcaatgtgctccggcatattgactgctcaaccagactcaggcggatggccgcctacgttatgcagagagctcaagaacacactccggggtgcttaaccagctccggaccctgtaaccgaatcgttaaacagtgcggaccgtgggcaacggacagtgcggtttgggtgcgctgatgcataacattgtcgaggttaccattacttagttgttgcgagagctttatggctactgagggcag

SEQ ID NO: 648 - DNA, 1281 bp, Unknown
  Ga0272428_1021842 JGI
atgagcaacgtgtttgttttagataccatgcatagaccacttgacctgatacacccaggactagcacgtaagttattgaccagtggcaaggcggcggtgttttgtcgctatccgttcacgatcatactcaaaaaagaagtggaggaaccaacaatacacccgttacgcatcaagcttgacccaggcagtaagacaacaggcatagcgatagtcaacgatgcatcgggcgaggtcgtatgggccgcagaactggcgcatcgagggcaagcaataaaagacgcattagagagtagacgtgccatacgccgttcacgtcggcagcgtcacacacgctatcgcaagccacgctttgacaatcgacgccgcaaagagggttggcttccaccgtcgctagagagtcgtatccataccatcctgacatgggtcaaccgcttatcgaggtattgcccaatagccgcaatctcacaagagttagtcaagtttgatatgcaacttatgcacaaccccgaaataagcggcgtagaatatcagcaaggggaattacaaggctacgaactgcgagaatacctgcttgaaaagtgggggcgagtgtgtgcctattgcggcgtgaaggatgtgtcattgcaaattgagcatatccaggcaagagccaacggcggttccaaccgtgtgagcaacctcacacttgcgtgtgaaccatgtaatgtcaagaaaggaacacaagacatacgggacttcttgaagggcaagcccgatacgttggaacgggcacttgctcatgcgaaagcccccttaaaggacgcggcggcggtgaacgcgacacgatgggcattgtacgaacgcttgaagcaaaagggcttacccgttgagacaggaacgggaggacgcaccaagttcaaccgcatgacgcaaggcttagacaagcagcattgggtagacgccgcctgtgtcggggcgtcaactcctgtcctcttgattgatcgggtacgtcccttgctcatcaaggcaacagggcatggcaaccgtcagatgtgcttgatggatagatacggcttccctcgcactggccccaaatccgcgaaagtggtacacggttttcaaacgggagatatggtcaaagccgttgtaccaacgggcaagaaagtggggacgtacatcgggcgcgtcgcagtacgggcaacgggcagcttcaatgtgacgacgaaaacacatgggacggtacagggcattggctataaagcttgtgtaatactacataaaaccgatggctatagttactaa

SEQ ID NO: 649 - DNA, 242 bp, Unknown
  Ga0272428_1021842 JGI
gtcaagaaccccacgcagagaatgcgggggcttgtgaaagcaagcctgtcttgaccagtctcagggaaacctacgccagggaagaatgtataggtacgtcaggatgcagaccagtcttgaccactacggttgggaattaaacagtctgtcggggtgataggcagtgttgccaacaagaaaccttcccatagcattgacgaggtactcattacctccgaaaggagaggctcatcatgagcaac

SEQ ID NO: 650 - DNA, 1494 bp, Unknown
  Ga0310134_003633 JGI
atggtatacgttatatcaaaaaacgggaaacctctcatgccgacaaaacggcatggcctggtgaggatactgctaaaagagaaaaaagcgcgtgtagtgcagcgcaagccgttcactatacagctgttgtacgacagcacgacatacacacaagacataacagcggggtttgacacaggccgagcgtaccagtcaatcacagccgtcaatgcccggacaggcgaggttttgtactcgtctgtgctggaaacgcggaacaaggaagtacccaagcttatgaaatcgcgcaaaatgtatcgggcgataaggcggcacaacaggcggatgaaaaaagtaagacgcgctgtaaggaataaaacatacttcagagcgccgaagaaagtagtctggcccggcgcaaaagagccgataaccgccaagtatatcaaacccaaagaagcgcggttcaataacaggaagaggccggaaggctggctaacgccgacagcagtgcatcttttgcggacccacctcaactattttaagaaggtcaggaagatactgccgattaagacgctggtgctggaatacggaaaatttgacattcagaagctagagaaccctgatatcaaaggtgccgaataccaacgcggcaaattgtacggctacaataatctgcgggaatatgttatagcggtacagcagggcaaatgcctgttatgtgaaaagaagccgatagaacacctgcaccacgtaatgccggggtcaaaagaaggcagcgacacatacaaaaacatagccgggctgtgcagcaagtgccacgcaaaggtgcacacaagcccaaaagcaaaagaaaagctggccgagaaagctgccggcactgcaaaagaatacgccgacacgagtatactcaacataatcatgccatatctgtacagcgagctaaaatcgatgctgggcacggaaaacatagcattatgctacggctacgaaaccgaggcagccaggaaatctttcgggctggctaaaagccacagcaacgacagctatgcaatggcgcttatggcaatcggacaggcgtccaggatagagaagatagagccgtaccggtacaaacaatacaggcgtcacaacagggcgttttgcgatgcccagcgcgacaggctgtacaagaaggacgggaagatagcggcgaggaacagacgccgcaggacggaacaggaaggcatctctctggcggaataccgcagcgagcttataactgcgcttggcaagaagattgcgacgagagagatatcaaagctcaaggtgtatagagcagtcaagaaaaagagcacgtcaatcaaagatgtgctatttccaccaggatgcgcagtcaactacaaaggacaaagagcagttgtcaaaagttttttcaacaaaggcagctcgctgatattggaaggcatttctgggtatgtgccggccaaggactgtcagcttattactaagaaagcggggatagtatgtctgtga

SEQ ID NO: 651 - DNA, 212 bp, Unknown
  Ga0310134_003633 JGI
gtcaactacccccgtctaaagacggaggcatgaggtttcgtaaccaagtgttgtacctgcgggtacagtagttgaacaggcggcgatgcggctgggcactccaggatgccactcccagtcccggacactgccgacgagccgcatcaagccgggggagaccaaccggctaacgatagccgagcaattacctaaaaagaggtgcaaaggaaatg

SEQ ID NO: 652 - DNA, 1239 bp, Unknown
  Ga0247610_10094209 JGI
atgatatatgtattgaataaagagggtaaacctcttatgccgacttctcggcatggcaaggtaagacgtttattgcgtgataaagccgcagtaatagtcaattacaacccttttactattcaattaactacggagacaagaaatgaagtagatgaagtttcattaggtgttgataccggttatagatatattggtttatcagccacaactaaagataaagtcttatttgagtgcaaagcagaattaagaattgatttagttgacaatttaactgctagaagagaattaagacgtaccagacgcaatagaaagttaagatacagaaaacctagattcttaaatcgtaaacgtgaaaaaggatggttgcctccgtctattaaaaacagattggaatgccataaaacacttattgcaaaagtacacaagtttttgcctgtaggcaaaactattgtagaagttgcaaatttcgatattcagaaaatcaagaatcctgatataaaaggtgctgagtatcagcagggtgatcaattaggtttttggaatgtacgtgcctttgttttatatagagataattatacttgtcaatgctgttttggtgaatccggtaatgataaattacaagctcatcatttaaaacaaagaaaagatggaggaagtaatgctcctgacaacttaattactttatgtgacccatgtcataatgatattcatgctaaaaggaaaacattaaatgttgaccctaaagggaaatcttataacgcagaaacccttatgaatacattgcgtaaatatctgtttagagaccttaaagaaatatatcaaaatgtaagttttacttatggttatataacaaaatcagtaagaattgaaaataaattagaaaaagaccataatgtagatgctagatgtatttcaggaaatcctttagcaaaacctaatggtatttacttatttaaaaaggtaagatgtcataatagacaacttcataaatgtaaaacattaacaggtggaataagaaaacttaatcaatcaccttatatagtacatgggttcagactgtttgataaagttaagataaataatcagataggatttatatatggcagaagacaaacaggatattttgctattaaaaatatagatgggaaaactatttcaaaaagtatttcatataaaaagttaaatctcgttgaaaaacgaaaagggtggattgttgattttaaacaatctgaattgtaa

SEQ ID NO: 653 - DNA, 335 bp, Unknown
  Ga0247610_10094209 JGI
attgacatagagtacaagtgaaacgcatacaagtgagcaaagtaactgtatataaataaactttacaatttgtttatatcttttacatagtctaagtgatttcactgaaaagtgaatgaactacgttatgagagaatgactgtaaaaagtcaaatagttaccttcggatgttcatctagtctgaagctctaaggtgtatgattaaacagtcggtattgctgacagtgttgtacacaacaaacctctcaataacattgacgaaggtgcttatcagttttgcagtatctggctttgtgaaagcataaactgcaacctattttaaggaattttaaatg

SEQ ID NO: 654 - DNA, 1323 bp, Unknown
  Ga0265292_1000080 JGI
atgaaaaccacaaacagagttttcgttgttgacacaaatcataaaccattgacattatgccgacccgttagggcaaggcaattgttatgggacaagaaagcggcagtactgcgccgatatccattcacaattattttgaaagaatcaaaactaaatgctgttgttaatcccgtaaaggttaaggttgatcccggtgcaaatactactggaattgcgttagtagacataaaaaagaatattgttatattcgcatcggaacttgaacaccgtgggtttggaattaaatcttcaatagattcccgccgctcacagcggcggtctcgtcgcaatcacaatctcagatatcgcgaggcaagatttgatcaccggaccagaacagacaaatggttgccgccgtcattacggcatcgtgtagaaacaacaatgacctggattaatagatttatgcgatttgcacctattgaatcgcttgctatagagcacgcgaaatttgatattcagaaaatgcagaaccccgaaatatcggtggtagggtatcaacaaggcgaactatttggctatgaagtcagagagtatctacttgaaaagtgggggcggaagtgtgcatattgcgggaaagagaatattccgcttgaagtagaacatatagtttctaaaagcaaaggcggaacagacagagtgtctaatctaaccatttcctgccgagaatgtaacgagtcgaagggcaatcatcctgtagcagaatttttagcagataagtccgatgtccttaaacgcatcttagcccaagccaaatctccgttaaaaagtgcggcaataacccaagccacccgtaatgttttaacattagcgatgtgcgataccaatcttatagtagaaaccggaactggcgcacaaacgaagatgaaccgggtaaagttgggatataaaaaagcccattggattgatgctgcgtgtgtcggcagttccggcgtggcagttaatctgaatgtcggtatgattccgatgtccattaaatccaaaggacatggcaatcggcagatgtgcggaacggataaattcggctttccaataagacatcgctcaggacaaaagaagtattttggttttgagactggcgatatagttaaagcggatgtcctcgccggcaaaaaaaacggaagatatattggacgagtgctgtgccgtaaaagtggctcatttgatatttcaacggctatcggtcgaattgaaggaattccttggaggtgttgcaaagtagtccatgccaatgacggctatagttatagacaaggggagggagcaattcctcctcatgtctaa

SEQ ID NO: 655 - DNA, 331 bp, Unknown
  Ga0265292_1000080 JGI
gtaatgaaccccacgacttcagtcgagggcttgtagaagctccaattcattaccagcccaagtcccggattttcggggctacgtttaattggagatggtacctacgaatgcgtgccagttcgtagcaataccgctgtttttcatgctgccgtagatgaggatacggcgaaggaggctggcgtaacaatccttttagacattggcgaggcaaacattactcccgcaagggatggaacggctgggattaacccagcaacaaactgtggttggcggggagcaatactctccgccgacttcagataaacgagtcggagtcgtaaactatcgggag

SEQ ID NO: 656 - DNA, 1281 bp, Unknown
  Ga0257070_1000485 JGI
atggtttatgttctaaatcaaaacggacagcctataatgccgacatcgaaccatgcaaaggttcgtattctcttaaaaacaggtaaggcaaaagtaatccacaggtgtccgtttaccatacagttacagtatagtagcacgaactatacacaggaagtcagtcttggaattgatgcaggaagcaagcatatcggagtatccgctacaacagaaagtagagttttatatgaagccgatgttgagcttagaaacgatatagtggatttactgtccacacgtagacagaatcgcagagcaagaagaagccgtaagacccgttaccgtaaaccccggttcaacaatagagtttccgctaaaaaagaaggatggttagcaccctctgtaaaactgaaagtaaatactcacttaactgtcatagcgaaagtacataagatacttcccatatcgaaaatcgttgtggaaacggcatctttcgatattcagaagattaaaaaccctgcgataagcggtacagaatatcagcagggcgaacaattaaacttctggaatgtcagggaatatgtgcttttcagagatggtcacacctgtcagtgctgcaaaggcaaatcaaaagacaaaatccttaacgtgcatcatatagagtcgagacatacaggtggagacgcacccaataatctgattactctatgctcagtctgtcataagggacaccacaacggtactgtgcagttaccaaaaaccatcagacgtggaatgtctttcaaggatgcaacgtttatgggtatcatgcggtggtcttgctataacaaactgaaagcgatctacccaaatgtaaatctcacatacgggtatattacaaagaatactcgaattgagaatggtttaccaaaagagcattatatagatgcccgttgtataagtggtcattcgttagcggtaagcggtggcgaagttttctatcagaagaaagtacgttgtcacaatcgtcagatacacaaaagcaccataaacaaaggtggcaagcgcaaacttaatcaatgtccatatcaagtacaaggatacaggctttttgacaaagttctgtataagggacaggaatgcttcatattcggtaggcgtagggatggaagattcgccgtcaggttgctagacggaaccaaacttaatgaacagatcacatacagaaaactgagatttttagaatctgcaaaacatttcatcacagaaaggaggacgccgctcctcatcggggcaagccccgacgttcccgcggctgtttaa

SEQ ID NO: 657 - DNA, 278 bp, Unknown
  Ga0257070_1000485 JGI
actaatacccacgggcaagcccgtggggttgtgcaaacaacccggagtgagtagcctaagtgaagtcttttgactgaactacgttaagagagaatatatagtcacctacgagcataatgcctaacttgtagctctgaggtcagtaattaaacaatcctgcggtatagggatagtgttgctgatataaaacctctcattaacattggcgaaggcgtgcaaccgctcttcagagcgagtaattaaatccttatgggatttggaaaggagcgaaccttatg

SEQ ID NO: 658 - DNA, 1449 bp, uncultured Erysipelotrichaceae bacterium
atgtggaccccgtccataaggacgagaacccgtaacccgtttggggataaggacgtgcgtaagcacacaactttacagtacaggaggaaggcatctgccatgaaaacagtatttgttattgcgaatgacggcacacggctgatgccgaccaatattaaacgtgcaaggcgtttgatgaaacgcagagaagccgtcatttgcagacatgatccattcactattaagctcaccagagattctgaacataatgttcaggatatcgagtttaaacaggatacaggcgataagcatattggcatatccgtctgctccgaaaaacatgaatatatcagtgctcagtatgatcctctgaaagatgaaacaaagaagcacaacgatcagcgcaagtaccgtcgaacccgcagaaaccgcaggcgctatcgcaagccgaggtttgacaaccgcaagaaagacaggggatggtttgcgcccagtattgagcacaagaaggaactgcatgtcagactcttcgagaaatacaatgatgtctgtccaatcaaaaaagcggtatttgaagtcggaagctatgatatccatgcaatgcaggaatatgaacagaacggtgcagttctgacaggcactgattatcagaaaggaccaagatacggcatgaccacacttcgtgaagcagtgctgtatcaccagaattatatctgtcctctctgcagaaagagtcttatcggtgcaagaactgctattcatcacagaggattccgaacaggcgacagatcaaacagactgaataatctgatggcagttcacgcatgggaacacacatcagccaatcacaaacccggcggattattatgggacatcaagcctgatcacaggccattcaaaggtgcggcgttcatgaacatcgtaagaaaagcaattgcggatgaaatcgagaaacggcatccgaatgttgccgtgatacgaacttatggcgcagagacaaagctccgcaggcaggatctgcacatccgcaaatcacatgcgaatgatgcctatgcaatgggcgagtatcatcctaaacacagatcgcagacaatgcactttcagaagcatcgcagaaacaaccggatactgagcaaattttatgattcgaagtacatcgatgttcgggacggcaggaagaaatcaggtgccgagcttagctgcggacgaacaaacagatgcgtgccccgcaacaatccggagaacaacagagtattcagagggcagaagctcgctaaaggcagagtatcagtaagaagacggagatatccaattaacagcgaggatgctgttattgtcaacagaaaaaagctgattgccagcggcactgcacattacggtgaatacgtgcacttcggcaaaggtcataaagatgtaaaaacatcacaagtgaggatccgctgccatgcaggcggatgggtacagatataa

SEQ ID NO: 659 - DNA, 345 bp, uncultured Erysipelotrichaceae bacterium
gtcaataaccccgcctaagttctaatgaactataggtgaggcttgcggaaaacgcaggcctgattgattagcctgagtgcttcgagcactgcgttatacaggaatgtataggcacttcagaatgctccacaagttctgaacactgcgagcccgagtaaacatctctgagggcaggagaagtcggaggcagtctgatatcttcggatatcagaaaaaccctgtataactttggcgatgtggaccccgtccataaggacgagaacccgtaacccgtttggggataaggacgtgcgtaagcacacaactttacagtacaggaggaaggcatctgccatgaaaacagta

SEQ ID NO: 660 - DNA, 1431 bp, Unknown
  Ga0223845_11721960 JGI
atgcctaccctccgcaggcaccacgtggaaaagctcttaaggcgcgggaaggcaagggtcgtggaatacgtccccttcgtcatacagctcatgtatgactccccgtgcgtgacacagcccctctacggcgggacagaccccggaaggaccaacatcggcaacgccgtcatggacggcaggggcacagtggtctacaaggaccacgtgacgacaaggaacaaggagatttcaaagctcatggctgccaggaggcagtacaggatggcctcccgcaggggagagcgcctggccaggaagcgcctcgcgaagaggctcggcactacgatgaaagctgtactggaacgggtactgcccggctgtgacgggcctgtcaaggtgaaggacatcatcaacactgaggcacggttcaacaaccgcagccgcccgaagggctgggtaacgccttctgtaaaacagctcatccgcacccatgtgaatatggtccggcggatcaggaagtacctgccggtggaacattggacactggaacttaacaggtttgccttcatgcagctggatgacggttccgtttatggcaccgacttccagaacgggaagctcaggggctaccgtgacgtaaaggactatatctggcacctgcaggaagggaagtgcctgtgctgcaaaaaggcaggcatagagcattaccaccacatcctgccaaggcacaagaacgggagcgaccgctggtacaacctggcagggctgtgcacatcatgccacgacaaggtccaccggggggagatatccataaaagcggaagggacccgccggcgctataccgggacatccgtcctgaaccaggccatcccggggatcctgaaggaattggaggaaatgttcccctctgtggacacatgcaccggcagggaaacagccgccgtaagggagctgctctctgtggagaagacccacacggacgatgctgtctgcatcgccgcgtacggggcaccagtatctggcgtgacagacaatgcgcatacctttaaggtaaggcagttccggcgccatgaccgagcccgtgtcaacagccagcgtgagcgcacctacaaggtacagacgggcttcaataaaaagggggaaccggagtacaccattatcgcgaagaaccggaagccccgctatgaacagaaggggcctgccctgagccagctggggctgtccaggcagcagatatcggtactgcacgtcgaaaagagcaaacggcactgtaatacaccgggccgcatgatgcctggagctgtattcatttataagggtgaacggtacgtgatgaccggccagctgacaaaaggaaaatatttccatgcagcaggctgcgggaaaaagagtttcccgacagcaaaatgcagcatcgtcagccacaatagaggattggtctacatagcgtaa

SEQ ID NO: 661 - DNA, 253 bp, Unknown
  Ga0223845_11721960 JGI
gtcaatgacccacgactaaagtcacgggcttgcagataaaagaaagaagcactgctttcatctttttctgtcatccgtggctatcatgcatcattgagcagaggcgtgacgcgccgctcaccccggggtgctttctagccccgggcgatggcaacaggcgcgccaagcataaggaaacatttttggcagtgcggagccttacaagctgtgaaacactgccctttatcacaggaaggaggtaccagtggggtac

SEQ ID NO: 662 - DNA, 1011 bp, Unknown
  Ga0118727_1075366 JGI
atgttagtgcatgttttaaataagcatggtaaacctttgatgccatgcgaacctcggaaagcaagaatccttctcacagaaggaaaagcaaagcctgtcaaaggcaagactggctattttacaattcaattattatacggaagcagcggttacaaacaagatattgttatcggaatagatacaggcgctaaaagagtgccagtagctgctgttggtaatggtaaagtgtattacgcaaaggaaaaaattcttaggacggacgttaagaaacaattgtctgacagagtaagttacagacgtacaaggagaagtaggaaaacgagataccgtaaacctcggtttctgaacagaacaaagaccaaatgtgccagatgtggcatcaataacgtgccaaagcgttggaaagaagtaaaacgcaaaaatggcaagagcagaaagagggtgtgcgatggcagagcgcaactttgtcgtcaatgtcaaggcaagaaaggcacacacaagaggccgcatattcttgcgccatctgttaaaaatcgtgccgaaagcatccttaacgacattcacaggttatctcagtcacttcctatctccaagatagtcgttgagatagcatcttttgatacgcagaaaatggctgatgccatgataaaaggtgttgagtatcagcatggaacgttgttcggctatgaagtcaagcagtacctcctaacagtacacaagcataagtgcgcatgctgcggtggattatcagaagacaatgtattgcaggtggagcacatatacccacagaccaagggcggaaccgataaggttagcaatctgaccatctcctgccgagtatgtaatgaggccaaaggaagtttgacattaggtcaatgggagagaatgttgcgtgctttcccaagtgagattaatgagaagcgattgaaaaacatacctgctattaggaagcagagcaaactcaagaagggattccagtacagcgcgttgactcaaagttataagaattac

SEQ ID NO: 663 - DNA, 291 bp, Unknown
  Ga0118727_1075366 JGI
gtcaagaacccctcctgattgttccaatcagaaggagcttgcataggcaactcttgcaacccctatattgacagcctaagtttctttttagatactacgttatccagttatcacacccttgggtgtttcaccagcccatagaagtagtttggctctgtgggggctctgtaaccagtcgtgagaggtagcgacagtcaaccccaggacgacctgacattttaggcaagctggataacattggcgaggtggtgcgtacaaatctaactccgaaaggagctgcactttatgtta

SEQ ID NO: 664 - DNA, 1245 bp, Unknown
  Ga0326512_10006706 JGI
atggtttatgtattacataaaaatggaaatcctttaatgcctactaaaaatcattctaaagtaagatgtttattaacaaataaacaagctaaagttgtaaatacagaaccttttacaattcagcttttatatgatacttctgaatatgttcaggacgttaatttaggagtagatagtggttgtaaacacattggcatttctgctactactgaaaaagatgttttatttgaagctgttgtagaagaatacgataaaacttctgaaatgttacaacaaagagctatgcttagatgtactcgtagaagtcgtaaaacaaggtacagaaaaccacgttttatgaatagaactaagtctaaaaaagaaggatggatagccccttctataaaacatactgttcaaacacatttaacaataattaataaagtacataaaatattacctattaaaaatattattgtagaaatagcaaattttgatattcataaacttaaaaatcctaatattaacggtaaagaatatcaggaaggagaaatgaaagattattataatgtaaaacaatatgttttagatagggacaatcatatttgtcaatgttgtaaaggtaaatccaaatgtaagaagttaaatgtacatcatataaagtttagaagtaacggcggtggaaattcacctttaaatcttataactttatgtgaagactgtcatagtgatttacacgataataaaataacattaccagaaaaagtaattaaaaatgtaacatttaaatttcctacacatatgaatataatgaaaaatactttaattaaagaattaaaacaattatattcaaatgtagatattacatacggctatataacaaaatattatagagaatcatataatcttccgaaagaacattatatagatgctagatgtatttcaggaaattatacggcagaatcattaggatattattatatatttaaaaaacttcgttgtcataatagacagattcataaatgtataataaaatctaataatgtaagacctttagcaaaattatcttatgctatttatggatttagaatgtttgataaagttttatatgataataaagaatattttgtttatagcagaagaaataatggctgtttcagtataagtcctttatatgacctaaaaacatatattcagaaaacatataaaaaacttaaacttatagaaccgtgtaaacatttagtgtgtcaaaaagtagttatttaa

SEQ ID NO: 665 - DNA, 290 bp, Unknown
  Ga0326512_10006706 JGI
ataaaaatttattaaagttaataatcctaaaattaaaaactttaggttagtaattagtctaagttctgaaataagaactacgttatttgagaatatattatagttacccatgggtgtaataccaagcctgtggctctaaggtaaatagttaaacaattcttatttgtggggaatagtgctatttatttttaaaacctcaaagtaacattgacgatggtattttaccacttttatagtgagcttatttaagtgtttaaacactttttaaagaaaggaaaaggttttaaatg

SEQ ID NO: 666 - DNA, 1371 bp, Unknown
  Ga0209777_10000441 JGI
atgcagaagtttaaagaagagtttcagaacgtacctacgaatgcttcactagtttgtagctctacaaatttgatgttaaacagagaggacactctcagtgcatcaaatcgcctcgaaagaagcacactgactttaaacaatcccgaagtgaatcgagttcaacaaacaggacgctcattaaaagtatttgtgtttgtacttaatatgcaaggcattcctttaatgccttgttcttatgctaaatcaaaacgattaattaaaaaaggagctgctaaagtaattaaaagatttccttttactatccaactcaattttgagtgtgaaaatcacactcaaaacataaatttaggaatagattctggttatgaaaacatcggtttttctgcttctactgaaaaacaagaattaatttcaggcactttaattttagatggaaaaactaaagaaagattagaagaaaaaggaatataccgaagaggaagaagatataaattatggtacagaaaatctagatttaataatagaaaaaataaaaaaatacaattacctccaagtatagaaagaaaataccaaactcatttaaatttaattaaaaaattaaaacaaattcttcctatttctgaaatttacatagaattaggaatttttaatgttcaaaaattagaaaatccacacattaggggagcacaatatacgcaaggaaatctctataaatatcaaaatatgcgaaattatttatttgctaaacaaaatggaaaatgtcttttttgtaaaaaagatttgaaaggattttcttctcatattcaccacattaaatcaagaaataataacggaaataatagagcagaaaatttaactttatctcataaaaaatgtcatgtaaaaatacataaaaaatctttagataaaaatctaaaatcaaattctaaagattataaacaatctacttttatgaatataattagtaagagatttcaaaaaaatcttccagatataatagggatatttggatatgttacttctatgaaaagaaatgaattaggattagaaaaaactcattttaatgatgctttcgtaatagctagaggaaataatcaaattagatgtaagtctattgaaattaaacaaatacatagaaataacagagttttacaattaaatagaaaaggatttaagccttctattaaaaaaaataaatctaaagtaaatcctggagatttattttggattggaaaaaaagaatatacttgtaaaggaatgtttaactatagtagatatattctttttggaaaaatgaataaaaaagaatattttaaattttcagaaataacaaaaatttttcattttggaagttttgcatggaatatttaa

SEQ ID NO: 667 - DNA, 271 bp, Unknown
  Ga0209777_10000441 JGI
gtcaattgtctatccataatagattaaaatcgtgagattttacgtaagaattgattagggagcttaaaagaaatttttatgcagaagtttaaagaagagtttcagaacgtacctacgaatgcttcactagtttgtagctctacaaatttgatgttaaacagagaggacactctcagtgcatcaaatcgcctcgaaagaagcacactgactttaaacaatcccgaagtgaatcgagttcaacaaacaggacgctcattaaaagtatttgtgt

SEQ ID NO: 668 - DNA, 1242 bp, Unknown
  Ga0268280_1002972 JGI
ttgaaagtatttgtagttgataaaaacctaaaaccctgtgacccagttaattctgcggttgcacgtatcttgcttagagagaagaaagcgactgtctataagcattatccatttgtaattaaattgaaagtagcttcagacatagagccacaaggcttacagttgaagattgacccaggttcaaaggtaactggtctagcaatcgtgaaccaggaaacaggagaaataatatttggtgcggaattggaacaccgtggatggataattaaaagagacttggatagtaggcgaaagtcaagacaatttagaaggtatcgtacagttaggtatagacctgctagatatcttaatagaaaaacccctagtgggtggatagctccgtctctaatgagtagagtatacaacattttaacttgggtaaaaagactgttaatttatactaatatatcaagtctggcagtggaaaaaagcacatttgacattcaaagaatgaatgatcccaatatctttaagagagaataccagaggggagaattatttggatttgacgctagacattacttattgcaaaaatataattatacttgtgtttattgtggaagtcggggtggctctttcgaattagaccatgttattccaaggtcaaaaggtggaacaaacaagataagtaatctggttttagcttgtaaagaatgtaatagaaaaaagggaaaatcttttctagatgagtttttagcaacaaaacccggattatgccagaagataaaaaatacaatttctcgtcctttacaacacgcagcagctgtaaatattactaataatcggctggtaaaagaattactacaatttaatttaccattggacgtggggtttggtagccagactagttttaatcggaattctcaaaaaatgaagaaagaacactggatagatgctgcgtgtgttggaacacttaatcacgatcttcattataatgataactttttggtgtttaatataaaagcatatggtcgtggtaagcgaaaaatgtgtcagaccaataaatacggaataccgacaaagtatagagaaagagcaaaaattagatttggttttcaaactggagatattgtaaaagcgttagttcctagaggtaaaaataaagggtttttaaagggaagggtaactgttagaaagaggcccacatttcatattgattgtgcagattctataaatcctaaatatatgactctacttcaaaaa

SEQ ID NO: 669 - DNA, 293 bp, Unknown
  Ga0268280_1002972 JGI
ccccttgaaaactgataccatgatttgtaatttttttgataccaacttttgtaatcttgctttaactttgtgtattcagaaaggttacccggctaagtgatgatagcaatatctgaactacgttatttcggtcacgacaccatgggatgcttcaccagtcccatgcaactgtcgcctgcggttaaacagggtaattccagtgctgcaagcttaacaagccaagatatacattgccaaggtgacgtgtggaaacacacaccacccctttaatgggagagtatttaattgaaagt

SEQ ID NO: 670 - DNA, 1335 bp, Unknown
  LHMISPF_alex1_c100 JGI
atgtctaaaacccccaatcaagtattcgtacttgacaacagcaagaaacctctaaccccgtgcctaccagtgatagctagaaaactattaaatgcaggtaaagctaaggtttttagactgtacccatttacgattatcctgaaaaaaacagttgatgaacaaccggaaccaatagaaattcgcatagatccaggtagtaaaactacaggcctagctttggtgagcttaacccaagtaatttggggggctgaacttacccatcgggggcacgcgatcaaatcccggttggaaacccgcagcgccatccggcgcagccgtcgtcatcgtaaaactcgttatcgtcagccacgatttctaaatcgcacccgcccgaaaggttggctacctccctgtttggaacatcgagtgttaaccacaattacatgggttaatcgcctttgtaagttagcaccaattaagtcaatagcttttgagttggtaaactttgatactcaaaaaatgcaaaacccagaggtttctggtgttgaatatcaacagggggaactgcaaggttatgaggtgagagaatacttacttgaaaagtggaatcgcaaatgtgcttactgtggcgctgaaaaattaccattgcaagttgagcatattaacccacgcgcttcttgtggtagcaaccgcgtttctaacctatgcttggcctgtaaaaaatgcaacaccaaaaaggggactcaagacatcaaagactttctgaaaggtaagcctgagattctgaaaagaataatgagtcaagctaaagcaccgttaaaggatgcggcggcggtcaatgggactaaatctgctttgcttcaagctttaaaggctacgaaactagagcctatttatgtgggacggggttctctaactaagttcaatcggactaaattaggtttaccaaaggctcattggatagatgcggcttgctgtggagatgtgactcagggattaactttggcaatcaatcaacctttgttaattaaagctatgggttggggtagtcgccaagttgtacagactgataaatatggtttgactcgcaagggttatcagcctaagcaaaaggtcaaaggttggaataccggagatatgatctcagtgattggtggcaaacatgagggggtgaaatgcaagggaattaaaactacaaggtttaagggtaactttgatattcgagtaaacgatactactgtgattagcgtttcgagaaatcaaattaagccggtttacagaaatgacggatacaactactcatttgtaggaaattgtcgcgaaatgtccgagaaaagagtgagagcaataggatag

SEQ ID NO: 671 - DNA, 276 bp, Unknown
  LHMISPF_alex1_c100 JGI
agttacggtttcgcttaggttctatagacttactcaaatcctagacatttccgaataaaccccgaaattgctaagtaagtccaggctttcgttattggcaagcgttcaagttcataccttgaggtgcgtgccagccccaagctctataactcggcagttaaacaggcaaggattttgtaaagccagtgctgctgagaaagtaccgaccaataacaatgccgaggccacctttactaactaggaatagacgcaaccatgtctaaaacccccaatcaa

SEQ ID NO: 672 - DNA, 1362 bp, Unknown
  Ga0307249_10042978 JGI
atggcaacatttgttatcgcaaaagacggcacccggctgatgcccaccaccaacatcaagaaggtgcgaaccttgttgaagaagaaacgtgccgtcgtctactgttatgacccatttacgatccagttgacctatgaaggaaccaaacatgtgcagcctatggaactgacacaggacgccggctaccagcatatcggcgtatccgtgaagtcagagaaacacgagtatgtttccgagcagtacgacctgctcccagatgaaccggagcggcataacgaccggcgtaaataccgccgttcccggcgaagccggaaacggtaccgcaaaccccgtttcgacaaccgagccattcccaaaggatggctcccgccatccctggagcataaggagcagctgcatgtacagatcttcgataagtacaacgcggtagctcctatctcacaggtagtggtagaggtagcccagttcgatacgcagctgctggaagcaatagaagccggtaagcccttgccggaaggcaaggactaccagcgaggtgaacagtacggatacgacaccctgcgggaagcggtattcagccgggataagtacacctgcctctgctgtggaaggaatgcgttcaaagacggtgccatcctccggatgcaccatataggattccaaaccggcgacaggagcaaccgcatggggaacctggcatctgtgtgtaccaaatgccacaccgccagaaaccataagcccggcgggaagctgtacggctggaagccgaagctgacaggcttcaagggcgccgccttcatgaacgcggtgaaatttcagatttgtgaggcacttcggatgaaacacccggatgtagcagttaccttcggcgcccgtacgaagcgagcgcgcctttaccggcaactagccaagtctcataccaacgatgcctactgcatcggcagttatagacccagacacagatcgagaccgacggtatacgccaagcgccgcaggaacaaccgctgcctggagaaattttacgatgccaagtatgtggacacccgcgatgaaaccgtcaaaagcggcgctcagctgtcttgcggacgaacgaaccgttcgacaccaaggagcaatccgctcaatgagcggatctaccgcggtgaaaagaagtccaaaggacgcaggagtattcgccggaggcggtactcactgcgaccctatgacatcgttcaagtcaacgggcgcagatgtaccgttaagggcgtgcaaaacaaaggcgcctatgtggccctcagtgatggtactgtggtcagcatcgcaaaggtcaaggccatccgccacattggcggatggtccaaggaaaccacaaaaccggcgtag

SEQ ID NO: 673 - DNA, 377 bp, Unknown
  Ga0307249_10042978 JGI
gtcaataacccccacttaacctagttggttagaagtggaggcttgtgggaacgcggaagcgttcctgtgagcctgattgattagccagggtctaacgacccctagagtgaccctgccaagtctgcggatactggcaggtgagaactacgttacacacaaatgtataggcaccggaggatgctccacaagtcctccgcactgcggtgtgtctttaaacatctctgagggtaggagaagtgaggcacacatcgaaactgtgtgtaacattggcgatgtggaccaccgcccaaaagggtgaggatcccggacgcttgccgtccgggaaggcgtaggcctttgcaacactgaacgaaaggagcatcagcttcatggcaaca

SEQ ID NO: 674 - DNA, 1365 bp, Unknown
  Ga0163144_10177891 JGI
atgctatacgcattactccgtgttgttgcggaggagcgcatgatgactaagtcgtcgtctgttgtgttcgttatcaacaaaaatagtaggccgcttatgccttgtcgctctatgagggcgcgagtccttctgcgagatggtctagctaaagtggtatcgcgagttccgttcaccattaaacttctaacccagcaatcggagtacaaacaggatgtaacggctggcatggacactggagcaaaacacattggcgtcgctgctatttcaagcggtagcgtcgtataccaggccgaagtaaaacttcgcggggacgaaattaagggcaagatggaccagcgtagaatgtatcgccgcacccgtcgtggccgcaagacacgctacaggaagccaagatttcttaaccgcggtaactccacaaagactggtcgcataccgccaagcgtgcgtcacaagttacaggcccatgaccgcgaaagactattcgtcgaatccatcctgcctgtcacaaaatgggtcgtagaaaccgccgcgtttgatatcgctaaactatctttatcagataatgtagcgacgcttaaaggcgccgattaccagaatggacgccagaaaggtttctacaacgctaaggcattcgtcctccaacgcgacgcctacaagtgccagtacggcaaaggtaagtgctcaaaaattcttcacgtccaccacattatctttcgttcgaatggcgggaccgataagccagaaaatctcataactctctgcaaaattcatcacgacgcccttcatgcagaaaaattaggtacatttctttcgctcgaaaaatctcttgcgcgaaaagcctctacaaaagtaaagggagccacccaaattagcatgattgcggcccacattcgtcgcaactggtggaatataactgagacattcggctacgagactaaattaaaacgagaagcccttggtcttccgaaaactcattacaacgacgccgtcgcaatctgccttaacgaaaaagaaaccgtcgagatttcaaacatcaagtattcaaagcgcctcgtatcaaaaggcgattaccagcagacatcaggttccagaagcgaaaaaactatccctacaggcaaattatttggcctcaggaaattcgacctaatatcgacacccaagggaacagggtttgttaagggaaagcgcagttcaggatttttcgccatatcgctactcgatggcgagtccatcaccgattccgtaagcgttacgaaaaatactgtccgattatccgcaagggccttagtcctgatttccagaactatccttgccaaattccttcccgccgtaaacgacggaatatcctttggaggttcaagatga

SEQ ID NO: 675 - DNA, 318 bp, Unknown
  Ga0163144_10177891 JGI
gtcaatcaccccaccctaaacggtggggcttctagggtgacctaggagggtaactggttgaccagaggactaacaaaggagacgaaagaaagtgttagtagacgttaaagcggagaaaaacatacacacccagggatgccatcccagtcgccggctctgtggttctgtcgttaaaagagaggaaactctcggtgcgctgaactttaaaacccgctttaacccctcgagggaaggtcggattcgtgtggctactcctacgccatgctatacgcattactccgtgttgttgcggaggagcgcatgatgactaagtcgtcg

SEQ ID NO: 676 - DNA, 1392 bp, Unknown
  Ga0265595_1002166 JGI
atgcagaagttatcaaagagagatacatacacacctacgaatgcttctcaagtttgtaagctctgtgatctgacattaaacattcctatgggtaaggaaagtgtggaagatttaaaaacctttgataacaactccgaagagaatctacagcattcacatagagctggtttgaacccaaaagtatcaaacattgtctatgtacttcaccaaaatggtagtcctttaatgccaactaaaccacaaaaagcaaggaggttattacaatgtaaaaaagcaaaagtagtaacaaaatttccatttacaattcaaatgttgataccaacaggagaagtaaaacaagagattacattaggtgttgattctggttatgagaatgtaggaatatcagcagttacagcaaagaaagaattattatcttataactttaaattaagaacaaatatgtcaaagttaatttctgacaaatcaatgtatcgtagaggtagaagaaataagttgtggtatagagagaaaaaatttcttaacaaaggtataccaaaaggttggttagcaccaagtatacttcacaaatataatagtcatttaaaaattatagagagaatacataagtttctactaataaccaagataatatttgagatagcaatttttgatatacaaaaaattaagcatcctattattaaaggtaaagaatatcaggaaggtgaacaaaaaggttttgaaaatgtaaagatgtatgtaagaagtagagatagttatcaatgtagaaattgtaagaagaagaatgttaaattacaagttcatcatataataagtagaaaaacaggtggtgatagtcctgataatttagtaactttatgtaaaaaatgtcatagtgattatcatagtgattatcatagtggtaaaattgaattagatattaaaaagagaaaaggctttaaagcagagacttttatgtcaacaataagaaaaagaattatagaagatttaaaaagcaaatatgatgatgtagaagagacttttggttatttgacaaaatgtaatagattagagttaaaattagaaaagagtcatataaatgatgcattttgtatagcaaatggtagtaatcaagaaagaagttttgttcaaaatataattcaaaagagaaagaataacagaaaattacaaatacaaaggaaaagatataaaccttctataagaaggcaaagatatagtattcaaccatatgatttattaaaaatcaatggtaaagaatatgtaagtaaaggtatacattgcaaaggtgaatcagtaataataataaaaaatggtaaaaagaagagtatttctgttaagaaagtagagaaagtatttcattttggaacattaatttatgtaaaggaggtatga

SEQ ID NO: 677 - DNA, 259 bp, Unknown
  Ga0265595_1002166 JGI
gtcagtaacccacgactgaaggtcgtgggcttgcagaagcccttgctgactaggaggcatacttagtatgcagaagttatcaaagagagatacatacacacctacgaatgcttctcaagtttgtaagctctgtgatctgacattaaacattcctatgggtaaggaaagtgtggaagatttaaaaacctttgataacaactccgaagagaatctacagcattcacatagagctggtttgaacccaaaagtatcaaacatt

SEQ ID NO: 678 - DNA, 1410 bp, Unknown
  Ga0111033_1162652 JGI
atgcaaacagtatctaagttatcagcagagttaaagaacgcaccaagggatgcttctctagtcccttgctctgcaagttctgcattaaacagagaggaaactctcagtgtgcaggacaaagtactggctgataaccttggcgaagagaacctactcgggaacaggagaaaacactctgtattagtgtttgtactgaacaaggagggcaaggctttaatgccctgccctcctggaaaagcaagacatttattgaagaagaaggcaagggtggttacctgcaagccgttcactatccaattactttatggcagttcaggatataagcagccgattacacttggaatagatgcaggctatagtaacataggattcagcgcggtttcacaggagtcagaattgattgccggggaagttaaattaagaaagaatatgtccaagaaactgacagaaagacgaatgtatcgcagagagagacgaaacaagttgtggcacagaaagccaagattctcaaacagggtttcatccaagaaagaaggctggttagcaccatccatacagcacagattagattctcatattaggttgatagaaaaagtccagagactattaccaatttccaaaacaataatagaagtggcttcttttgatacccaaaaaatgcagaacccggaaatatcaggaatcgaatatcagcagggagaactgcaaggctatgagatcaaagaatatctactggagaggtggggaaggaaatgtgcttattgtggtaagacaaatgttcctttggaaatagagcatatcactcctgagtcgcgaggaggaaccaaccgggtctcaaacttgacgatctcttgtgaaaaatgcaaccggaagaaaggtaacaagacagcagaagaatttggatatccagagatacaaaaacaggcaaaagaaacactgaaagcagttgcgttcatgaacagcgtcaggtggaaattagtagactccttagactgtgactggacttatggatactccacgaagcataacagggcgcaaataggtttagaaaaatctcatgttaatgatgcctttgtaatagccggaggaagtaatcaaaaacgaatttgggattgcagtgtgaatcaactcagacgaaacaaccgctgtttgcagatgaatagaaatggattcaagccgtccataagaaaacatagatatgctttccagccttattctctggtaaattacgctggtgctatttatgaagtcaagggagtatttaacagaggcacctacatcagattaaaagcagaaaaagacatcaatgcgagaacagaaaaagtaacattatatcaacacatgaacggaatggcaatccatcccccaccaatcagagattggagggggtcttcttgccagaaaagataa

SEQ ID NO: 679 - DNA, 278 bp, Unknown
  Ga0111033_1162652 JGI
gtcaatcacccccaccaaattctgacgaatttggaaggggcttgtagggcgacctgcaagggcaactggttgattagccaaagagaggtttgcgatgcaaacagtatctaagttatcagcagagttaaagaacgcaccaagggatgcttctctagtcccttgctctgcaagttctgcattaaacagagaggaaactctcagtgtgcaggacaaagtactggctgataaccttggcgaagagaacctactcgggaacaggagaaaacactctgtattag

SEQ ID NO: 680 - DNA, 813 bp, Unknown
  Ga0373927_0000008 JGI
atgctggtgtttgtcgtatcacaagaaggaatgcctttaatgccgacgatgccccggcgaacacggatctggctcaaggcgaaacaggcccgtgtcgggcgtcgagagccgttcaccatccaactgcgctgcgagacgaaagcctctgcccaacctgcgcctgtaggcgtggacgcaggatcacacacggtcgggattgctgccatcgcaaacggcgcggtcgtgtttcagacggaggtacagttgcacgataccattccagagaagatgacacacaggtgcaggtcccgccgctcccgttgtgctcgcaaaacacgctatcgagctgcgagatgggccaatcgacgtcgcctggaggaccaaatgccgccctctccgcgttccagggcaacgtccatggtgcaagcggcccggtatattatctcactgctcctcatcggtcaggtgaaccatgatgccgtggctattgcctgtgagatgggcaaggtgatcaagcccctttcgatcattcagcagacccgatgcctgccgcgaggtctgtatcagcgcttcaacggactgtgtagcgagcagaagtgttggacgccaaagaaggtcaaaggcttcaagcgctacgagctggtccaggccagaggggtgatgggttccatgggagaaaggcgagagaaaggatcttttgttctcaacgatgttgccagtgggaagagagcgttagaggtgacgtcacgcacgcttactcagggcaggatatcgctacggtatctcgccctggagaatacgagaaaggagagcggcgcttcctcccccgattga

SEQ ID NO: 681 - DNA, 813 bp, Unknown; identical to SEQ ID NO: 680
  Ga0373927_0000008 JGI

SEQ ID NO: 682 - DNA, 819 bp, Unknown
  Ga0070730_10006957 JGI
atgggccgtaaggccatccttttctgtgaggtcgtgatggtattcgttctggatcagagcaaacagccgctgatgccctgtagcccgaagcgggcccggctgctgttggcgcggggtcgcgcgcgcgtccaccggctggtgcccttcaccatccgcctggtcgaccgccgcgtggccgcgagcaacctgcagccggtggtgttggggatcgaccccggcagcaagacgaccggcctggccctgacgcgggaggagccgacgcccgcgggtccgctgcggcacgtcttgcacctgggcgaactagagcaccgcggcgggctggtgcgcgagcgcttgcgcaagcgcgcggcggcccgccgccgccggcgcggggccaacctgcgctatcgcccgccacggttccacaatcgccgccgtagcgcgggctggctgccgccatcgctgcaaagtcgggtggacagtgtggcgcattgggcgcgctgttaccgccggctggccccgctccgccgggtggcggtcgaggcggtgcgcttcgacacccaactgctggagcacccggatattggtggtgtcgagtaccaacggggcgagctggcgggctgtgagttgtgggagtatctgctgctgaagtgggggcaccagtgcgcctactgcgggcgggacgacgtccctttgcagaaggagcacatcacccccaaagcgcgcgggggcagcaaccgagcgagcaacctctgcccggcgtgcgccccgtgcaatatcgccaaagggccgcgtcccgcagcggagtacggccacccaaaggtgcaggcgcaggccaag

SEQ ID NO: 683 - DNA, 309 bp, Unknown
  Ga0070730_10006957 JGI
gtcaagtaccccacccgtaaacggggggcttgtgaggagcaagcccggacttgaccagccttagcagtggagccgaaggacaaggcgttgacactgctacgttgtgggtagagcaaaagtacacaccgggggatgcttctccagtcccccgctctgtcagcggccaggtgcagataacgtccgggggggcgcggaacggcctggcgcagatggctgacctacaacattggcgaggagagccgcttcgagccgtccgtcggagcgcgtcacatgggccgtaaggccatccttttctgtgaggtcgtgatg

SEQ ID NO: 684 - DNA, 1335 bp, Unknown
  Ga0118720_1022568 JGI
atgttagtctttgttaaaaacagaaacggtaaaccactaatgccttgtagtcccactaaagcacgaaaacttttaaaagcgggacaggcaaaagtggaccagcggaccccttttgtaattaagctgaaattcggttctagtggttacactcagaaaaccacggctggaatggacaccggtagtaaagtgattggaaatgctgccacatcccatcaaaaaactctataccaatctgaaactatacttagaggagatgagattaaaagtaaaatggaacaacgccgaatgtataggcgtagccgtagaggacgaaaaaccagataccgaaaaccacgatttctaaatagaagggcaagtactagagaagggcgactagctccaagcctgctacacaaagttaaagcacatttaaaagaacgaaaattcattgaatcaattctacctatctctcattggaaagttgaactcagccagtttgatattcatgctatctcaaatcctgatgtttctaaaagatattggtggacttaccagaatggtccacagaaaaacttttacaataccaaatcttacattttgagtcgtgatgaacacacttgtcaatcatgtaaatcaaagaaaaagaatttaaaacttcatgtacatcatattgaattccgttccaatggaggaacagatgcccccactaaccttataacactatgtaaaaattgtcatgacaaagtacacaaccacaataacgctcaacaagaatctctaaaaatgtcaaaaaaaatcaaaaacaaaactaaacatgctactgaaaccaacattatagcctcacatcttcaaaactctgactggagttttgaagaaacttttgggtttgagactaaatttaaaagagagaaattgagactacctaaagagcattactttgatgcggtagctatctgcttggctgatgatgaaatgattaaatttgaaccgcaaactttcattaaaagacttattgctaaaggagattatcaacaaacaaaaggaatcaggtctgaaaagaaaatgcgtacagaaaaaatactaggtttcaaaaagtttgacaaagttgagtggatgggacataaagctttcattaaaggcagaatgtcatccggatacgccattttaatggacataaaaggggataagataaatttaaaacccatccctaagctaaaaaatggacttgtacgcatacaagcgaggaaatcatcgattatagatcaaaaaatcatagaaaatacctcattctctaccacatcatccttgtcaccaagtacagaaaacaacttctcgtttatacaggagaacatgtga

SEQ ID NO: 685 - DNA, 311 bp, Unknown
  Ga0118720_1022568 JGI
gtgaagaacccagcgactaaagatcgctgggcttcctacattaatcatggaagccctacttcaccagaaggctaacagaaaggagagaaaatgttagcagctgttagaacagagaaacacatacagacccctgggtgccacctcagccttgggctctctgattatgcattaaacagctgtgagggtaacagcagtgtgtatagtttaaaaacctgttctaactcttcgagaggatgtcggattctgaatgtgatccttactcattcagatacgcattactctgttttctgtcagagggagactttatgtta

SEQ ID NO: 686 - DNA, 804 bp, Unknown
  Ga0395674_000262 JGI
atgccctgcactccagcaagggcaaggatgctactgcgtgggcggaaggccgcggtcctcaggcgctatcccttcacgattatcctgaaggcccgcacagatggggatttacagccgatagagctcaaagccgaccctggcagcaaggtcaccggatttactgtggcttgcgaagattgcaaccagagcaagaacaaccttaccgccgcagaattcgggcatccgaacattcagaagcaggcattacgacctctcaaagacgcttctgctgtcaatgccactcactatgtcatcggggctgcactcaagtctttgggattgccggtatcgttctggaccggtggcaggactaagttcagccccactcaacaggactatccgaaagcccactggattgacgcggcctgtgtcggtgagtccgggaatcaggtcaagcttgatctgcggatgcaggtatcgcaggttaaggctacagggcacggatcacggcagatgtgtcggatggacaggtttggattcccccggacttctactaagacagctcgtgtagtcaaagggttcaggactggagatattgtcagagcagttctcccttacgggaagaagacaggtacttatgacggcaaggtagccgtcagggcatccgggagtttcaatgtatcgactgctaccggtatagtcctggggattagctacaaatactgttctgtggttcatagggcagatggatattcatatctaacaaatacaggcgctcctctcggcaatgaattaccgagtatccgcgcccaggagttgtcatga

SEQ ID NO: 687 - DNA, 270 bp, Unknown
  Ga0395674_000262 JGI
gtcaaccactcgggattgaaatcccgagcatgttaagtatccgaaagggtacgcgcatgctctagttgaccaggctcagtgtattaacactacgttaccggcgaatacataggcaccttgggatgctggccagtcccagactctgcggcagacagttaaacaggtgtgagggttaagcccgtgctgcctgcatataaaccgtcggataacattgccgaggtaaacattacccgcgtaagcggagattaacggagtagtccaattcaacgt

SEQ ID NO: 688 - DNA, 753 bp, Unknown
  Ga0315273_10011693 JGI
ttgagagttcctatcaatatttatgtattaaataaaagaggtgaaccccttatgccttgttcaccaagaaaagcaagaattttgcttaaagagggtaaagcaaaagtaacaaagaactatccacttattattcaattgacacaagcaactggtgagcaaatacaagaatgttctcttggtattgactctggtgctaaaaatgtaggtttttcagtaattactgataaaaaagagatagtttctggagagttgattcttgatcagaaaacttctgaaagattaacagaaaaaaggatgtaccgtcgtggtcgaagaaataaattatggtatagaaaaccacgatttaataatcgaaagaaatcagaaggatggttgcctccatcagttcaaagaaaatttaacactcatattactctgattaataagttgaaaaagcttcttcctatcaaacaaacaatcatagaggtgggtaattttgatattcaaaaaataaacaatccagatatttcgagtgtacaatatcaacaaggatcaatgtttgaatatcagaatgtaagaagtttcttaatggctagagaacatggtgaatgtcagttatgtaaaaagaaattttcaaaaggtaacggtcctcacgtccaccatattataccaaaaaataatggaggaacggattcagaaaaaaatctatctttacttcatgaaaagtgtcataaaaagttgcatagacaaagtttatataatttgttaaaacag

SEQ ID NO: 689 - DNA, 247 bp, Unknown
  Ga0315273_10011693 JGI
gtcaactacccacggataaatccgtgggcttgaatcgtgaggttcaacgcaagagttgattagagagcagtttaaagcaaggttaaagaacacacctacaggtactccactagcctgtagctctgtaaattttatattaaacagagaagaaattctcagtgtataaagtaaagtaccgactttaaacaatctcgaagtggatctacttcaacataaaggaggatagggcttgagagttcctatcaat

SEQ ID NO: 690 - DNA, 819 bp, Unknown
  Ga0113881_100828 JGI
atgccctgttcaccggcaaaagcgcgccttctgcttaaagagaagaaagctattgtgaagaggcgaacgcctttcactattcagctgacgattgcaacgggtgaaaccaaacagccggggagtctgggcgttgatgccgggtacgaacatgtcggcctttccgcatcaacggaaaaggctgaactttatgcatccgaagtcgaactgcggcaggacatcaccgatctgctctctgctcgtcgcgcgttacggcagtcacgccgcaaccgcaaaacgcgctaccgtgctccgaggttcgacaaccgcatccgcaccaagcgcaaaggctggcttgctctgtcgcttgaaaaccgaatcaacgcgcacttgtcgcgcatagaagcggttcttcgactgctgccggtcacgaagatcagcgtggaaacggcttccttcgacatgcagctgctgaagaatcccgacattgcagggaaagagtacccagagggcgagcagctcggcttctggaacgtccgcgagtatgttcttttcagagacaggcacgtttgtcagcattgttacggcagatcgaaggatccggtgctcaatgttcatcacttggaaagcagacgtaccggtggagattcgcccggcaacctgattacgctttgtgagacgtgccataaggcacttcaccgcggcgatatcacgttgaaggccaagcgagggaaatcgttccgtgcggaagccttcatgggaattatgcgctgggaagtacacaaccgtctaagagctttgcatccggggattgaggtgagcaacacctatggataccggacc

SEQ ID NO: 691 - DNA, 247 bp, Unknown
  Ga0113881_100828 JGI
gtcaactacctcggcctaaaggccgcggcttgaaaaagcctctagttgactagcctcaggccgtcatttggcggactatgttggtcgggattttataggcaccgcgggatgcagatcctagtcccgcgctctgcggctgatggttaaaagctctgagaggtaggagcggtgctgtcagcttgaaacccctttcaacattggcgaaggatcacaaccggtcgaaagaccgaggagataaaacttgaga

SEQ ID NO: 692 - DNA, 1275 bp, Coprobacillus sp. 3_3_56FAA
atggtttatgtaatttcaaaagatggcaaccctttgatgtcttgttgcaatgtaattgcaagactgcttcttaagcaaggtaaagcacaagtcaagaagcgcgagccatttacaatcaaattaaattatgaaacaacgaactatcttcaaaatctaactcttggagtcgatacaggaagtagaaccattggaactgcggttagcaacgacaatggagatattttatatatgtctgaagtggtagttaggaatgatattacagaaaaaatgacacagagagctaaatatcgcagaaatagacgaaatcgtaagacccgttacagaaaagcaagatggttaaatcgagctaattcgattaaaaatgatagatttagcccaacaatgagaagtaaactttatagtcatgtaaaagagatagagtgcattaaatctatcctccctattacgcaaatggtttttgaaactgggcagtttgatacacatcttatgaaaaatccaagtcttgctaaccctagaataaggcgttggggttatcaaaaaggtcccaattatggatacgaaaatacaaaagccatggttcttaatcgcgataattatacatgtcaatgttgtaaaggaaaacataaggacagtaaattagaaattcatcatattgtatttcgtagcaaaggtggttcagacgaggcaagcaatcttattacactatgccacacttgtcacaaagacttacatagtggaaaaattaatcctaaattgaaaggtagaattaaaggtaaccttaaatttgccacacaaatgaacacaatacgtaaacaactttttcgattatacccaaatgcaattgaaacttttggatatataacaaaagcaaatcggttacaacttggtgtaaataaagaacattattacgatgcttgtactattgcaactcaagggaacagattcacaataaagagtaatctttataaaaagaaatgtatttcagatggtgattttcaacaaacaaaaggtatatgttcaaaacaaccgattgttacaaataagattcatggatttagaaaatttgataaggttcgctatttgggcaagaattattttattaaaggtagaatgtctactggatacgcagttcttatggatataaatggcaaaaaagcagacttttcaaatatgccaaaaggatttaagactccaaaaatggctaattttaaaagaatagaggctaggacgacatggatgactacaaccgtggtgctcacttcaaatatagcatga

SEQ ID NO: 693 - DNA, 295 bp, Coprobacillus sp. 3_3_56FAA
gtgaactaccatagaccataaaggtctatagcttctgttaaatggttcaccagactcagctgatagaaacatcagctacgatatttaggtcatgataccctcggttgacgcaacagaccgtcgctctatcgtacatatttaagttgggtcagagtaagaacagccctgtgatatgtatgtaaaaagcctttatatcattgtcgagttgaggacggaacagctatatggtaacagtataggaaagtacgcatcacctaccattaggtagagtatttataaggagacttatttatgg

SEQ ID NO: 694 - DNA, 1176 bp, Metagenome
atgatagaaaataaaaaagaatttgcgtttgttttagatggtaacggtaagcaattagaccctaccgttatacaaaacgcatggagattaattagaaaacaaaaagctgtattagtttctaaatttcctatggttattaaattacacaaatgtataaataaggttaatgatgatgaaatacatatgggaatagatgatggttctaagtttgttggtatagctttagttcaaaaatgcaaaactaaaaataaattgttgtttttgggtacaattcaacaacgtaaggatgttcataaattaatggttgaacgaaaagaatatagaatgtatcgacgaaaattcaaacattatcgtgaacaaagatttaataatagagcatcatctaagcgtagtggcagattaccaccaactattaaacaaaagaaacaatctatactgagagtaattgatagattattaaaatatatcaaaatcaatgtatatcatttggaaaatacaaaatttgatataagagttttaatagatggatataaaccgaaaaattatacaaaaagcaatcgtttggatgaaaatttaagagtcgcaactatattaagagataaatgttgtgtggagtgtggaataaaaaatgttagatttgaagtgcatcacataacaccaaaatcaaaaggtggaaatgatacaataaaaaatctagtaacactatgcccacaatgtcatcaaaaaacatttggaaaagaatctgaatttgcagataaatattataaaattacaaatggtaagaaagtatttatagaagatgcaatgcacgtaatgcaaggaaaaaaatacttacaagacgaaatatctaaacgtggtattcttgtattgacaaatggcgcgaatacagcaaatacaagaattgaatggaatatagaaaaatcacatgatttagatgcttattgttgctgtgagttaaaatgcaacaaaacaaatttaataacatatatcattaaacctatgcggaaaaagagtagaaaaaagaaaacgaattctgtactagggtttaaacacagagattttgttgaatatacttatcgcaacggtgaaacttatcaaggatatataacagcattaaattggaaaaggaatgcgataagttttcgttctttatacaaggtatttacctggaaataa

SEQ ID NO: 695 - DNA, 306 bp, Metagenome
caataaaaactatatataagtgaatagaaatttatatgtcgttgtttaattttggtttccagcctaagtgactgcatttatatgaaaatataaatgcagatatgaactacgtcagtagaacatggtaaaaacacaccaatagatgtattccatcagtctgttgctctgtgagtgctaactaagaaactatactactgttctgtatagataacagggaaacacacgttcattctattgactttggcaagaaggaattttccattgtttataatgaggtttatcagagatgatagaaaataaaaaaga

SEQ ID NO: 696 - DNA, 1977 bp, Unknown
  Ga0209343_10010378 JGI
atgcaaggacaaaaacttggtatagatttaggcggtaagcatgtcggtcttgctgttgtaagaacaccgataaacgaggtggcacattactgcactattgaactcagagaagacattaaggataagatggatgagaggaggtctcttcggagggcgaggagaaacaggctctggcatagggaagcgaggtttgacaataggcaattaagggtgaaatgcaaatatattgataaagatacaggcgaaatctgcggagctaatactccaaagaaatccaatgtaaaacatcttctacttgagaatatactcgtcaatcttaaaatagctgatgaatctaaagaggaaatcagaagaagagggctggacagagacacaaacaaaagtgaattacagacaatccttgagaaattttcaataaataccttcctgaaaaaacagattaaagacatcattcttgaaaagggggaagggagggctgtcttttgcagagagcatatcccctttcattatgaacaggttgcaacagaggctgagagtttctggctgtcaaattcaataagggctaaacaggaccagatactctcccgccttaaaagaatagcaaaggattttaagatagatgaggtggttattgaaagggcgaactttgatttgcaaaagctccagagacctgatgagatagaagcacctgaagattacatgaagggtcctaacttcgggcacagaaacaggtttgaggcattgaagcaggaatatggcaaccgatgctgtttctgcggaaagaagggtggagatgaagtaaagctgaagatagggcatctctatccgaaggctaaagatgagataaacaggtgggaaaaccttataactatatgtgaaaaatgtaatgcgaagcagggtaaaaggacaccagaggaggcagggatggaatttgtaattgtaaaggagaaggtttttaatcctgcagcaggaagggtaatacccataaaaagagaactcaagccgaagcccataaatgaatcaaaggttaataaatatatgacccatactgatattggcataaggaggctcaaaagagaaatccagaatatttttggaagcatacctataagagaaacatacggctatatcacatcgtattttagaaataaatgggagcttgaaaaagaacattataatgatgctgtagtcatagcctctgacaaagaagatttgaatataaaacctgtatttaaagatgcagtccctcagacaattaaatcatctatcaagggcgggaaactctttgatacaaatcccctccagtttagtgatggaaagttttaccagaacataacccttataggcagaaaggcagggatgcgttcatcaaaacataaaaggggtcagaggaatatcaggaactatggctcaatttatatggatgagattgaacttataacctcagaatggaagaaaaaggttctctgcgaattaagagataaacttggttatgtaaaaggagataagaataagtcttttaagcctgaggaactgatgaatgcaaatctgcctttcaggactgtaactattgacaaaaggggtgtaggagaatcttcaacccgcttaatcaataacaatgtattccgtgcctcagctgaagtaaatacgcatataatggtctattcaaataatgacggtagaatgaaggcatttgcagtaaaaaatcctaagatatttaaagatgccggactccctcatgattttcaaaaaaagatattcattgtaaaaaagggggatattgttacatggaaaaaaagtgaagatggaattgccgtaacaggcagggtgaccaaatgtttgacaaaaaatggggtaattgatataaaggacatgaataataaaatacactcagggaaaaaccctgtgtatattgaaaagatagtatctcctgaaaggggtgctatttttgagagaaaatctctttctgctctttga

SEQ ID NO: 697 - DNA, 262 bp, Unknown
  Ga0209343_10010378 JGI
ctcgccataagaaggatactgtctgaaaggaggtttgagcctgaacactcttccaccttcctgatcaattgcgattaatagagggattttatggcttttaattgataattcctgaagggaattgcataaatctttaacctgtgacggagactctatatttcttgaaaataggattacccccccgaccccataatcagttattattccttttaactcatctgacatagtagtcccatgaaatcccaccataaacatctgcccg

SEQ ID NO: 698 - DNA, 1368 bp, Unknown
  Ga0209737_10031347 JGI
atggtatatgtaataagcaaggaagggcagccgttgatgccgacggaacgtcacggcaaggtgaaacacctgttgcgccagggcagggcgaaagtggtacggtctgccccgttcacaatccagttgcagtacgagactggaagccacacgcaggaggttacccttggcatagacagcgggtatacgtatataggtataagcgcaatgagcgacaataaggaattgctgtcgtgcgaggttgagttgcttgacggaatgaaagagcggatatatgacagggcaatgtacaggagaaaccgcaggcagaggctaagacacagggcaccaaggttcgacaaccgtggcagggcgcaagggtggtttccacctagcgtcaggcacaaatccgacagccacattaggctggcatatatgctgaaaggactgctccctataacgtaccccattgcagaggtggcgaacttcgacatacagaggataaataacccagacatacaagggaaagaataccaacagggtgagcagatggggtggcagaacgttagggaatacatattccacagggacggacacaaatgccagaagccagagtgcaaaagcaagggagagaaagtgttgtgcgagcaccacataatcccccgggcgcagggcggcaccgatgccccagacaacctcgtgaccctttgcaaccaatgccacacttccgaaaaccacaagggtttcctcaaagactggaaaccaaaggtgaacggtttcaaggcggagacctttatgaccaccgtcaggcatactatatgcgagcagctcaaagggatattccccaatgtcggaatcacgtatgggtatatcacgaaacacaggaggatagggcaaaaactggctaagacacacgcgaacgatgggtatataatagcgggaggtaaagggcaaccacgtgcggaaacgctgtcaattaggcagataaggcggaacaacagaagcctcgaacggttctacgacgctaaatacattgatacaagaacgggaaagcccgaatatgcgagtgtgttgaacaacggcaggactacccggaacatgaacctgaacggggagaacctgaaaaaataccgtggggaaaaagtcggcaagggtcgaaggagcattcgcagaaaccactatttctatcagcccaacgaccttgtaaagtatgaaggcaagatttatgaggtcaagggtgtcgtcaacaggggcaactatgtcgctctcaaaggcattaaaaaacagccaaaggtggaacagttgaaaccatacagattcagaaaggggtttgtgattgaaaacagaaagggcaagaggaatcaagggggcgcaattcaccccaccgcctaa

SEQ ID NO: 699 - DNA, 304 bp, Unknown
  Ga0209737_10031347 JGI
gtcaaccacccaccgcctaacgcctaacggcgtttgaggcgggggcttgtatgggactacgcaacctacaggccagttgaatagcccaagccttgaaacaaaggctacgttaccaagaatgacataggcacccacggatgcttcccaagtccgtggcactgcggacggtgattaaacatccccgagggtaggggaagtgttgccgccaaaaaccttggataacatcggcgatgggaaccaaccggggcaggtcaaactgcaacggcattatgaccccaacgggttcaaaaggagaaagagcatg

SEQ ID NO: 700 - DNA, 1173 bp, Unknown
  Ga0075011_10000624 JGI
atgtttcactcctctgaaccaaacaaacaaccactagtaccggttgtttccgtactcggctatcctctcatgccgtgtagacctgttagagctcgtaagcttgtagagcaaggtagagctaaaaagtgctggaaaaagggcttcttctatatacagatgcttgttcttaccgaagaacagactcaacctgtagttgtaggtatagaccctggatctaagagagaagcgtttactgttaagtcagaacacgctactctgttaaatctacaatcacatgcctgtgacggcaatagtataaagaaagctctagaatttagaaaggttatgcgtagggctcgtagatctagaactactccttgtagacctcctagattcaacaaccgctctagaaaaggctgggtaccaccatctactctagcgagatggcagttaaagctcaacatacttaatcatctgtgctttctctatcccataaaaactgtggttatagaggacgtaaaggctatgaccagaaaaggtaagaaacaatggaacagcaacttttcacctgtgcaagcaggtaagaactggctatacagccgtatacaacagaagggtcttgaactgattaaggttgatggatacaaaacctttgagctacgtgaagctgccaatctaggtaagactaaaaataagcttgctgaaacatttagtgcccactgcgtagactcatgggtgcttgctaactactatataggcgggcatgtacaaccagataacaccactctacttactcttaagcaggtaaaagttatacgtagacaactacattttgcctgtagatatagtaacggaaaaagacagcgttacggtggaagtatgtccttagggataaagaagggtactgtagtatttcatcctaaatatggacgctgtcttataagcggaaactataacggacgaataagtttactatcaccatactcacttgagagagttactatacacgctaaagtctcagatctgaaaatagtggcatactcaccgtgggttataaatggtaactataatcttcctatatcgtctaaacgtaacgatagagctactagaaagaacatagctagaactaggtttcttcaacaatctatgcgtagttgttgctcacaaaagaatttaatttcacttcttccctaa

SEQ ID NO: 701 - DNA, 231 bp, Unknown
  Ga0075011_10000624 JGI
atcaactatccagctcacaaggctgggtctgctaaatgctgccaacagctcatagcggaatagctagtcgaaaggctagtaatagttgattagccattaccaaaactgaacgacctgtggatggaaccacacagtacctacggatgctcccctagtctgtagctctacggttgtcagtggctaaggggtccttactcgtctcctcctgaacttaccgttaaaaggacacac

SEQ ID NO: 702 - DNA, 693 bp, Unknown
  Ga0116227_10001884 JGI
atgcaaacggttttggtagtagatacaaatagacggcctttgatgcgttgctctccgattagcgcaaggaagcttttacaagaagggcagtccgcagttttacagctgcagccttttacaatcgtcttgaaaaaaagagaaggagggtccgatagggtgtccaatttgacaatcggttgcagagaatgccatagcaaaaagtctaaccggtcccttcggggatttttacaaggcaaaccttctttacagtctcaaattcgggggaaggctaaaaagcctcttgccgatgcgtctgccgtcaataggacggggaaagagattgtatatcgtctcgccacatttgatctgcccatatcttgctccccgggaggaagggcaaagtttaacaggactcttcaaggatatcccgaaggtgaaagaagagtccgcggttttgcaacggcagatttggtaaaagcggttgtcctacaaggtaaaaaaaagggaacatactccggaagagtcgccatccgatcatcgggaagtttttgcatcgatacccctaagggaaaagtagcccgtatcagctatagattttgtaaacatctgcaatacgcagacggttatcaatattcacaacaaccacaacaaccaagggagcgacgcttcctaccgcgactcaagtcgcaggtttccgcgtcgtcagttctatga

SEQ ID NO: 703 - DNA, 252 bp, Unknown
  Ga0116227_10001884 JGI
gtcaactcccccttactctaaagagagaggcttgtaagaaaactaagcctaagttgaccggactaagttcttgtaagtaacaagagctacgttagagaagagtagataggcaccttggaatgcggctccggttccaagctctgcggtttacggtcaaaaacttctcatcccgttgccgacgagaacatcccccgggaaaagggagattgcaggtaactgctaactagtaaaaaaagagaaacgatgcaaacg

SEQ ID NO: 704 - DNA, 393 bp, Pelotomaculum sp. PtaB.Bin104
atgccttgcaaaccgcagaaagcacgaaagccgctcacggcaggcaaggcaaaagtggtaaaccacgaaccgtttaccatccaactgctgtttggttctagcgggtacaggcagtctgttacgctgggcatcgacgctggctctgtccatatcggtgcctcggcatctacgaagaagcaagaactctatgcttctgccaaaggagaacgttggtatattcgagggcttcgttctaaaagcagcttcgttctaaaaaaacttgatgggacgaagcttgagattatgccaagcaagattagcttcggctggcacaataagtcgtatttagtagaaaggaggagcgcggctcctctcgcggttaaaaccgcaagtacccgccgcgcaaattgttaa

SEQ ID NO: 705 - DNA, 302 bp, Unknown
  GENOME_ACESSION: mgm4547164.3 MG-RAST
gtcaactacccgcacctaaaggcgtaggcttgcgaaagcccaaacctttagatgcaggcatagcctaagttgactagcctaggtctcggtctcatttgctgggactccgttgtttttgttatcacacctgtgggcgtatatcctaacccgtggctctgtgctggctctgtaaaagccctgtgaggtaggggcggtcaaccagatgtaggccgattacggcaagcaattacaacattggcgaagggtagatttactctgatttgaggcttcggccttggaaaggaggtagacgtatcttgttc

SEQ ID NO: 706 - DNA, 1314 bp, Pelotomaculum sp. PtaB.Bin104
atggtatacgttttatccaaagacggcgcacccctgatgccgaccgaaaggcacggaaaggtgaggcggatgctaaaggacggcagggcgaaggtagtcaaagccaggccgttcaccattcaattaacgtatgaaacaacaagctacacccaacccataaccctgggcatagacgccgggtatcaagaagtcggcctgtcagcggtaacttccgaaaaggagcttttgtccgccgaatgcaccctgtttaaagggcaggtggaacgcaacaaagaaaggctcatgtaccgcaggcagagaagaaaccggctgcgttaccgtgcgccacgttttgacaaccggaggaaaccagaaggctggctggcgccgagcattcagcacaagctggacagtcacctgcgcctgatagcctgggtaaaaaagatacttcctatcaccgatgtggttatcaaggtagccagttttgacatccaggcgattaaaaatcccggtattcaaggcatagagtaccagaaaggagagcagtacggcttctggaaccttcgcgaatacattctgcaccgggacagtcaccagtgtcaaaacccggagtgccgtaacaaatccaaaaccccggtgcttcaaactcaccacataggattttggaaaagcgatattacagacaggcccgggaacatgatcaccctctgcgacaaatgccaccggccagagaaccacaagaaaggcaagttcctgtggggatgggagccgaaggtaaagtcgttcagggcggaaacatttataacaacagtgcggtggagaatggtcaatacgcttggctgccggcatacctacggccacataaccaaaccccgcaggatagagctaagactggagaaaagctactccaacgacgccttcgtaatagccgggggtagcagccaaacccgggcaaaaatgctcagcatcgagcagatccggcgcaacaaccggtctttgcagaagttctacgatgccaggtacatcgacattcgcaacggaaatgcagttggcggccaagaactaaactgcggccgacgtacccgtaacaggaatattaacgggcccaatcagcgggtataccggggcgagaaggtgtttaaaggcagggtgagcatcagaaagcagaggtactcgtaccagcccaaagatattgttgaatatggcggctggcggtacacagttaaaggcgtgcagaactgcggcgtctacatcaaattggcagaattgagcaagccagtgaggacggagttggtcaaacctgtgcggtacagcaagggtttgtgtgtgatgtaa

SEQ ID NO: 707 - DNA, 314 bp, Pelotomaculum sp. PtaB.Bin104
gtcaacaacccccacttaacggctgcgccgttagaagtgggggcttggggtagcgtgaggcgatagtcttacgtctccaggcccggttgattagctttagtggttggtatccggaaggaacgaaccgctacgttacggtggaatgggaaaccaaataggcactccggggtactccacacgctccggacactgcggccggtggttaaacatcgctgagggtaggcgaagtgctgccggcgacaaacccgtcgtaacattggcgaagtggacccacagccgaaaggctggcttatttccgaaaggagatcgcgatg

SEQ ID NO: 708 - DNA, 1380 bp, Unknown
  Ga0256404_1034523 JGI
atgctgacatatgtactggctgcagacggctcaccactgatgccgacctacaacatcaaaaaggtgagacggatgctaaaagacggcagggctgttatagcaggacacaatccggggtttaccataaggcttaattataatctgccggaacaggacgcccctcatactcaggagactgagttttgcgaggacacgggcgaccatcacatcggcgtgtctgtaaagtctgtaaagcatgaatacttccacggtcagttcgacctgctgacagacgaaaaacagcgtcatgacgactgccgggcgtaccgcaggacaaggcgtaaccgtaagcgctacagaaagccacgttttgataaccgccgcaggaaagacggctggtttgctccatcggttgagaacaaggtacagcgtcacgcagatatctttgcaatgttcgcaaaggtcctgcctataaagtctgctactcttgaaacggcgaggtttgacactcagctattagaagcccagcagacaggaaataaacttccacaaggcaaagattatcagcatgggccgaggtttaagcttatcaacctaagagaagcggtctttacgagagatggctatacctgtcagatatgtggcaagtctgtatctgacggagcaatactccgtgtgcaccatgcactgtactggaaaggcgaccatactgacaggttatctggtctgataacggtatgcgataagtgccacacgcctgagaaccatcagaaaggcggcaggttatggggcataacaccagaagtaaagtccatggcaggcgcagccttcatgaatgctgtacggtggcacataacagagatcttcaggtcagggttccccgatgtggagacccataccactaatggtgcggctaccaaagcttcaagaaggatgcagcgtatggcaaagacacacgctaataacgcttactgtatgggtgagttcagaccacggcacaaagcaagggagatgcattacaaaaagcaccgccgtaacaaccgtgtgctgagcaagttctacgatgctaaatatattgatgtcaggaccggcaaaaaggcttccggcaaggaattaggcagtaatcgtaccaataggtcggttccaagggataatcctaataacctgagaaagttccacggcatgaagctgataaaagggcatgtatctgtccggaaaaagcattatgacatacacgctggtgatgtagtgctctgcaaaggcgtgaagcgtctggtgcacgcaatacacagagggaacaacgtagagtttgaagctgacggcataagcccgaagtcagcttcgccggacaaggtaaagatcatacgaatgataggaggatggcacgcctcttctgaataa

SEQ ID NO: 709 - DNA, 373 bp, Unknown
  Ga0256404_1034523 JGI
gtcaataacccgcggttaaaaccgcaggcttggtctgaaacacaggactgagcctggttgataagcaatagcgaccccgtcaagtcgtttttacgatactggcagggcataagctacgttacccggcaaatataccataggcactttcggatgctccacaagtccgtaacactgcgggcgtgcattaaacatctctgagggtaaggagaagtgtgtacgtctcgttcttagaacgtaaaacaccgggataacatttgcgatgtggacacgtccttttaaaggacagaatcctgtgatggtctttatcacaggaagccgtaaggcattagtaacttattagcatagcagaaaggaggcatcagttatgctgaca

SEQ ID NO: 710 - DNA, 774 bp, Viral metagenome
atggtatatgtaatttcaaaaagtggaaaaccgcttatgccgtgtgagaatgtaattgcacgattacttcttaaaaatggtaaagcaaaagttaagaggaaatgtccattcacaattcaattaacatatgattcaacagaatatgtgcaagatgtgacattaggacaagatactggatcaaaacatataggtacagcatgtgttggaaacaacaaagttctatatcaatctcaagtagaactcagagacgacattaaatcaaagatggatggtcgtaggcaagctcgtagattcagacgaagtagaaaaactcgctatcgcaaagcacgatttttaaatcgtaagaattctactaaacttgataggttgcctccatcaattaaaagcaaggttagttcacattttaaagaattagaattttgtcacaagattttaccaatttcaagagaagttttagaagtagcacagttcgatactcaattactccaaaatccaatattagcaagtgaaaaggttagacattggggatatcaaagaggtaggctttatggctttgaaaatgctaaagcgtatgttttaatgagagataactacacatgtcaatgttgcaaaactaaaaaaggtacattgcacattcatcatattgtatatcgttctaaaggcggaagtaatgacacagataatttaattaccttgtgtgaaaattgtctatcttgtcttgatacacattttttgaaaaatactgtgtcgctttgtttaaatgagtttccttga

SEQ ID NO: 711 - DNA, 323 bp, Viral metagenome
gtaaatatgtgctcggataaagactgaccgccttttagtgtggcacagcacttaaattatttacaagacttaggtttgagaaatcttacctacgttagattggagaaacacatacacaccctcggttgatgctcaagaccgtcgctctgtgactactaattaagttaggtgtgcttaaaaaaatagccttgtgttagtagtttcaaaacccagtttaacattgtcgatgagaagaccaattctaattttggtaacagaaattagataggcactaccaagatagaaatatcttgagtttatactctaacaaggagttaaaaatg

SEQ ID NO: 712 - DNA, 1398 bp, Unknown
  GENOME_ACESSION: mgm4547164.3 MG-RAST
ttggcgaaggtattcaacggtatagtgtgtaccgtcttatcgagtaaaacacactattcagagaaaggagtgctgcttatgcaggcatatgtatttgtaattaataaagatggacagccgctcatgcctacacagcggtacggtaaaatccgcaggctgctgcgagacggacaagcaaaagttgttaaacgctgtccatttacgatccaactgctgtatgaaacaacagatgttgttcaaccggtagatttaggtattgacacagggtataagcatattggtgtttctgcctgtactgaaaagaaagaattgtatgctgccgatatgcaggtgcgtacggacatttccaagaaccttgaacagcggagagttcttcgccgcgcaaggagaaaccgcaaaacacggtatcgcaagccgagattcaacaaccgtgtccgcagtaaacataaagggtggcttgccccatcagtagaagcaactatcggtttgcatatcagagttattcatgatgtctgtaagattcttccgatcacatcaatcacgcttgaaaccgccgcatttgacacgcagaaaatgcagaacgctgaaatcagcggcgtcgagtatcagcagggaacactgatgggctataccatccgcggctaccttgcggagaaattcaatcaccgctgtgcctattgtggcaagacggaaaatagtgagacgaagttcgaagttgagcatgtcgtaccaaaagcacgtggtggttcctcaagaatcagcaatcttgtgtgggcctgccacggctgcaacgaagacaaaggcacacgtaccgccgctgaatatggacatccggaagtgcaggcacttgctgcaaagggcggatcaatgcgttcagcagctgcaatgtctgtgatgaagtggtatctctacaaccgtgtaaaaactgaatacgatgatgcagtgcgtatgacatatggtgcggatactgcgacaaagcggtataagttcaatctgcagaaagatcaccatatcgacgcccgctgcatttctggccatccaaatgcaattccttcgcaggaagtatattacatgcggaaaatcaggtgtcacaaccgtcagctgcataggctgaagatcaacaagggcggtactcgcaggaacaatcaggtgccatacgaagtatggggcatccggttgtttgacaaagttatatatcaaaacagggaatgctttgtgtttggcagaaggaattccggcagcatggatatcagattgctgaatggtgcaaaagttaatgccggagtatcgtataaaaaattgtctgtcatttgcaaagcgggaaatattattttagaaaggaaggtgattaccgacattccctgcctatggatgtctcaaatggtttcctgtcggtga

SEQ ID NO: 713 - DNA, 312 bp, Unknown
  GENOME_ACESSION: mgm4547164.3 MG-RAST
gtcagtaatccacggatatacccgactgtatgtctgaagtaaatccgggtgcttgtaggaaactataagtccatgctgactagcctaagtgttgaaacaagcactacgttgctttggtcatgacaccctgggacgtcgtacctaatctcctgcactgtcgttatgcattaaaagccctgttgggtaggggcggtgtgcataacataacaagccattgcaacattggcgaaggtattcaacggtatagtgtgtaccgtcttatcgagtaaaacacactattcagagaaaggagtgctgcttatgcaggcatat

SEQ ID NO: 714 - DNA, 756 bp, Unknown
  Ga0190303_1007606 JGI
atggattcacaaggtaatattggacatccaacacgaaattgtagaatggttcgaagattattgaagaaaggtaaagcaaaagtaatagctggtggtataaagaaaggtcagccactattaatacaattgcttgacaaagtatttgataaatctaaaacaactgatgcagaatttcgcattggtattgatccaggatataaacatatcggttatagtttatttaaaatatataaaaatcatattgagttactattatctggcgaagtagaaaccagaacatctgaagttactgagaatttaagtaatcggaagatgtatcgaaatctcagacgtcaatatagacgaaagaatgttaaacgtaagtttggaagagctaagtttagacatcctagatggaagaacagagctaaacatgcttttcaacctactcatagacatttgattaatagtcacattaatatattaaaatggctgttcaaaagagtaccaaaagatcaatgtgaagtgcatttagaatatagtaaatttgatgttcaaaagattattaatccaaatatttatggatggcagtatcaacatggtcctcaatataattttgaaaatgtaaaatcatatattcgtgatagagataattatacttgtcagatatgtaagaagcatgttggaaatatacaaaatgaagtacatcatattataccaagatctaaaggtggatcagacagaccggataatttgattcttttatgtcaaaattgt

SEQ ID NO: 715 - DNA, 324 bp, Unknown
  Ga0190303_1007606 JGI
ccaactgttgattaatataatttggagattttgaaaaaatgaaaaattttttttgatgtagattacctaatttcttaaaattagggctacaacaggcctgattaaatgttcaccctggaatgccactcccagtcccaggctctggaggtatcagtaattatattacttagtccttattgttgactagtaggtaacgaagatcaatattacatttaatcaagccgagggagaccaatctaattaattaagctgagctttttaattagcttttattttaagttaatttttaagtaaaaaaattggagacaaattttaaacatgatt

SEQ ID NO: 716 - DNA, 1260 bp, Unknown
  EMG_10019972 JGI
atgccgacactacgtaacggtcgtgtccgttaccttctgaaagaaggaaaagctaaaatctttaagtatcatccctttactatccagcttacttacgatactcctgataagacccagcctattgaaataggtatggacgcaggttatcagtatatcggagtatcggtcaagactaagcagaaagaactgttctctgcagaattcgagcttctgcctgatgagaaacagcgacatgacgattgcagaaagtaccgtagaacaagacgcaaccgtcttagataccgcaaaccacgttggaacaacagagtccattcaaagcctgaaggctggcttgcgccgagcatcaataacaaagctgagcggcatatagatatcattagacgaatcattagtgtcgctcctgtcaaatctataaccatagaagtcggagaattcgacccggctctgctcaaagccatgtacgaaggcaaagaaccgcctcagggaaaagaatatcagcagggcccactatactttgcagacagcttgagaaaagcagtatttcagcgtgataattatacctgtaatatatgcagaaagtctgcattaaaggacaagaacgtaatactgaaaactcatcacgcactgttctggaaaggcaggcatggcaacagcctgaatgagatgataacagtatgcagcaaatgtcatacgtcagctaaccatcagcctacaggaaaactgtacgggttagaacctagattacctaggcttgagggtgcaacatatatgaatattgtccgctggtatattatcaacacattgaaagcagcattacctgataccaacatagatttctgttatggtgcgttaacttcacgcaagcgtaaagatttaggtatagaaaaaactcatgccaatgacgcatattgtataggcagttttcagcctgaacagcgacctgtttctacaacatactataagaagaaacgtaggaatagccgtattcttgaaaagttctatgatgcgaaatactatgatattcgcgacggaagtatcaggaagggttcagaactaggctgtaacagaaccaaccgcagagaactgcgtaattctgaaaataacctgagaagatttcacggtgctaaaaaatctaaaggcaggcgtgtaatccgtagaactagatacccatttcagccgtttgaccaggttttgtttaatagcaaaaaatacattgtcaaaggagcgcagaatttaggcatatatattgctttaattgga

SEQ ID NO: 717 - DNA, 287 bp, Unknown
  EMG_10019972 JGI
gtcaactacccactgcctacgcgagcaagctcgcttagaggcgggggcttgtaaaagcctagttgattagcctaagtcttaaataaggctacgttataccagaatacattgtaggcaccagcggatgcttcacaagtccgctgctctgcgggtatatgttaaacatctctgaagggtaggagaagtgcatatatctttaaacctgatataacattggcgatgtgaaccacagggtttatccctgcattatcgtcccttacgggagaaaggagaccgttatgactacg

SEQ ID NO: 718 - DNA, 1356 bp, Unknown
  GENOME_ACESSION: mgm4784118.3 MG-RAST
atggacacgacaagccctcaaaacattggcgaggaaaccattaccccgacagggaggacattcatgtctaattttgtttttgttgtcgatactaaccttcaaccgcttaacccaataccgtcgggacaagcaagaagactgttagcacaacagaaagcagctatttatcggcgttacccatttacgctcgtactcaaaagggcagtaagagttccccaaacgcaaccgcatcaattaaaaatcgatccgggttccaaagttagcggattagcaattgttcgagatcgcaaagtaatttggggtgccgaattaacccatcgcgggcaacaaattaaaaatgacttagagtcacgtagcaaccttcgtcgcaatcgtcgcaaccgcaaaactcgttaccgcaaaccgcgttttcttaaccgcaatcgaaagcctggatggttgccaccaagcttagaatccagagtgaaaaacatcgtgacttgggtcagccgcatccgccgatatgtcccaattacaggcatatcccaagagttagttaaatttgatacccaagccatccaaaaccctgaaatatccggtgttgagtaccaacaaggagaacttgcgggttatgaagtcagggaatacttgctcgccaagtgggggagaaaatgcgcttattgtggcgttgaaaacgtaccttttgaggtagaacacatctacccaaaatcaaaaggggggagcgatcgcgtttccaatcttaccctggcttgtcgccagtgcaaccaagccaaaggcgatcgatatcttcgggagttcttgtcaggtaaacccgacattctgtcccgtattttgcagcaggcaaaacaacccttgaaagatgcggctgctgtgaattcaacccgcccttcattgttccaacaactcaagcaaacaggattgccaatagaagtttcaacaggaggtagaaccaagtacaaccgcactcgtttaggactacctaaaactcattggctggatgcagcttgtgtgggaaatcaagaagtgctgcaagttgtgacgaagcagccgttgttaattgcagctaaaggatgggggagccgtcaaatgtgtacgaccaataaatacggatttcctgtcaagcacaaaacgcgatgcaaaacgttttttgggtttgggactggcgacatggtaagtgcaattctcccatctggaaagtttgcaggcactcacgccggcaggttgacggttaggcaaagcggggttttttccatgacaacgccacttggcaaaattagtccggtgcgtcataaatactgcaagttaatccaccgcaacgatgggtatatgtatgcgttgtccgccgttgttcattaa

SEQ ID NO: 719 - DNA, 243 bp, Unknown
  GENOME_ACESSION: mgm4784118.3 MG-RAST
gctattcaccaaacagcgaacaaaagtggacaactacttcatatgctggagagatagccagcctcagttacaaactacgttttgggggtcatgacacctacgggtgcttttccagcttgtagctctgtcgtcaatcgttaaacatccctatttggttaaggaagtacgatggacacgacaagccctcaaaacattggcgaggaaaccattaccccgacagggaggacattcatgtctaatttt

SEQ ID NO: 720 - DNA, 648 bp, Chloroflexi sp.
atgtcatacgtctttgtcatcgataccgataagcagccgctttcccctgtccatccggggcgagcacgcctgctgctcaaagggggaaaggccgccgtctataggaggtatccgttcaccctgattctcaagcacaaggttgacaaacccgtgcccgcaccgttacgtctcaagcaggatattcgagacttccttgctgatcagcccgaccgactctgccatgtgctaacccaaacgaaagtacctctcaaagatgccaccgtggtcaacgtgacccgctccgaactcctgcggcgcttgcaggccattgggctatccctagaaacaggttcaggtggacgcaccaaatacaaccgcatcatgcgtggcctgccaaaaacccactggacagatgcagcctgtgtagtggtagggattgggggtccagggggcgaagccaccctggcggggtttggggtgtccccaaattctcccattccccaaagggttttgggcttctgcactaggcacggcaaaatcactgatgttccacaccgcttttgtcagcccatccatcgtagcgatggctatacctatcatcacggagtgaggatttccccacccccaactagcccgaaaggagcgcctgtaagtacctccacttgctag

SEQ ID NO: 721 - DNA, 307 bp, Chloroflexi
gtcaagtccccccatcctgacgtgtcagggtggaggctcggaagctagacttccaagccggaaacttgagcagacagaggtttgaaaaacaaccaacgttatcagtaagcgttaaagaacctacctgcgggtgcttcaccagcccgtagccctagaaccgttcagttaaacaggtgtagagggagaaactagtgctgagcggaaagtaccggctgataactgtgtcgaggtgagcatcacctgggaaaccagaggccccacggggcataaaacaaatagaaggaacacgacatccgccatgtcatac

SEQ ID NO: 722 - DNA, 1371 bp, Unknown
  Ga0183746_00132 JGI
atggcggttttcgtactggacaaaaagaagcaaccgctgatgccgtgcagtgaaaagcgcgctcggttgctgctggcgcgtggtcgtgccgtggtgcataagcgctacccgttcacgattcggctcaagaatcgcgtcggtggcgaggcgcaaccgcttcgcctgggcatcgaccctggcagcaaaacgaccgggctggcgctgatgcacgaaccggacagtcagcagcggcatgtgctgtgcctgtttgaactgatccatcgcggctttcagatcaaaaaggcattacagcaacgcgccgcctttcggcgtcgccgccgcagtgccaacctgcgctaccgcgccccgcgcttcaataatcgcatcaaacctaagggctggctggcaccgtcgctgcagcatcgggtggatacggtgatggcgtgggtcaatcggctatccaagtcggcacccatcaccggcatcagccaggagttagtgcgctttgacacgcagaagttggaaagccccgagatcagcggcgtggagtaccagcaaggcaccctgctgggctacgaggtgcgcgaatacctactggaaaaatgggggcgtgagtgtgcctactgtggcaccgccgatacgccgctggagatcgagcatatggtgccgcgttcacgcggcggctcgaatcgcgtcagcaatttgaccctaagctgccatccctgtaatgccgagaaagatagccagacactgaccgattttttcgccaccaacaaaggcctgaaaaagcgcctcaaggctaacggcttatcagctgacgcacagctggaacgtgtacagcgccagctcaagcaaccgatgcgcgatgccagtgcggtcaatgcgacccgctgggcgctgttctccgcgctcaaaaccacggatttaccggtcgccgtgagcagcggtggccgcaccaaatacaaccggcagcgcctcaacatccccaagacgcatgccctggacgccgcgtgtgtcggagcttttggtaagctgtatgactggacagagccgacactgacgatcaaggcgatggggcgcggcagctaccagcgcacgcgcttaacgaaacacgggtttccgcgtggctatctgatgcggcagaagcaggtgcacggctttcaaaccggcgacatggtgcgtgcgatagtacccaccggtaagaaggccggtacccatacggggcgtgtcgcgatacgcaaaaccggcagtttcaacatccaagccgaacacggtgcagtgcaaggcatttcccataaatactgcaccctcatccaacggagcgatggctacggctattacgtcacactcttcagcaacctaacaggagaagcgggacgggcggtggcgtaa

SEQ ID NO: 723 - DNA, 294 bp, Unknown
  Ga0183746_00132 JGI
gtcaactacccccgcctgaaggcgggagcttgtgaaagcaagcctagttgaccagggtaagcgggcggtacagccgctacgttgataacaggtcgccaagactcacccacggatgcttcctcagtccgtggctctgaaaggtcaagatcatgctggcgcagggtaaaacgccgaaggtcttgaccgctgccacaaggcaggagccggttatcgacattcccgaggggagacggggcgtaagccctgcgacacaaggcccgtaagggcgctatttaaggagaagatcgcatggcg

SEQ ID NO: 724 - DNA, 2622 bp, Rock porewater metagenome
atgcgctggctgctaacattggcgagagggaccttactccgagaggaggtagactctatgttagtctacgttatcaacaagcacggaaaaccgttaatgccctgcaaaccacagaaggcaaggaggctgctgcaagagggcagagcgaaggtcatgaggcgcacgccctttacggtccagttgctttacgggtcgagcggttacagacaacccgtcagcctcggagttgatacgggagccaagtacgtgggggttgccgctgttcggacagacgagaaaggaagagcaaagaatactttgctgcaaggcgagtgtcagctgcgagcagatattcgcggcaagatggaccgacgcaggtcctatcgcagaacaagacgtggccggaagacgaggtatcgaaagccaagatttgataacaggcgtcgaccggaaggatggttggcacccagcattcagtccagggttgacggcacgctaaaggtgaccgatttgctccgccagctgcttccggttacttcagtagaagtggagaccgcgcagtttgacacggcagcaatggcaagaggagtcctgcgactgaggccctggcagtaccaacggggcgagcagtaccagtttgaaaacgtcaaatcgtacgttcgacatcgagacggatatcgatgtcgccagtgcaaggccaaaggtcgtccgttggaggttcaccacatacgaaaaagagctgatggcggaacagatcgccccgctaacctgataacgctgtgtgaaggttgccacgatcgggtccataagggcgggatcaagctgacggcggttcctggaagaaccaatctccggtatgccgcccacacccaagcaggcaagacggcccttgtggcagccctacgggaacgactcccgacttccgagacgacaggcgccgtgaccaaagtcgatcgacttgagatgggactatcgaaaacccatgcgggcgatgcgctggccatagcggctacaggggtacccgtcgaacctgtggacacccagttttttatgcgctgtatcccaaagggaaactaccggctgttcaaaggtgctcgcagccatatccgtaatcagagcgcccgcgaactgtttggcttccggcgtctggacaaagtatgcttgcccggtggtcaagaagggttcgtcaaaggtaaacggacctctggttacttcaatgtgagcacacttgacggcactgtgatcagcgcgtcgatctcgtacaagagattgcgtctattggagaaacaaacatcgctgctcgtcgaaaggaggcaggccgtttctatgaaggacaccaggcttgtgctgacggctactgttgttactgtagggtccgagatcgttgaggggatcattctcaacagtaatgcccggtatttatcacttcaactgcaggcagccaatatcagggtgctaaagcacgtttccgttgacgatgacccaagtgcgctaacggaggcgctcaaggaagccattaaagaaactgacgtggttgtagtcaccggggggctaggcccaactgaagatgacataacgagggaagcggccgccagcgccctgggagttggcctgactcaagatagggaaatggttgagcagatcgagaggtacttcagggaccgacacctgacaatgagcgagaataacttgaggcaggcaatgtctcttgagggcggcgaggcgctgactaacgatagagggacagcacctggtcagttcgtcttactggatggatctcagaaggcccttgtgctcctgccggggccaccttcagaaatggctgctatgtatgagaaacaggcgcagccgcgattggagagatttgccatggccagcggcagggcggttcagtgggtctcaaagcagattcatttctttggcctgggtgagtcggagctagcaaggcgactagaggggatactgcctgcagggcagagggacgagggacttaagattgctacaatggccagtggaggcacggtaactctgcgcctgggcgccgccagcggccgcctaaagctgctaagaacagccgggcaagctgtccacagggcactgggcgaatacgtctacggggaggataccgatacccttccaggggctgttgggcgtgggctgattgagcgcggtttaaagatggccatcgctgaatcctgcaccggtgggctcctgggctatcaacttacaaccgtggcaggtagttcagactactttataggtggtattcaggcctacagcaacggcgttaagaaggatgtgctaggggtaacaaagagcattttcctggaggatggggccgttagccctcagtgcgctgaggccatggctctaggggtgatcaacacgttgaaggccgatattggtgcctcgattaccgggattgccgggccaggtggagggagccccgagaaaccagtgggaactgtctggtttgctgtggctggtccagatggtactgtggtagatggacagcggttccagggagatcgggatacaattcgacgtcgagccgcgactcactgcctgggtctggtgtggaaatccctatgcaggaatcactcaaacccttcccgaatggaacacagcatgagagaggtgtaa

SEQ ID NO: 725 - DNA, 272 bp, Rock porewater metagenome
gtcaactaccccggactgaagtccgaggcttgtaaaagcctctagttgaccagcctaagccttgaaacagaggctacgttagcagtagagcttagacgccttacccggaatacccggataggcgacctaccctggggtgccccctcagctccaggctctagaactccttggttaaatagtcctgagagggtagggacagtgccttggagatgcgctggctgctaacattggcgagagggaccttactccgagaggaggtagactctatgtta

SEQ ID NO: 726 - DNA, 480 bp, Symploca sp. SIO2E9
atgcaacgagttccagttatctcaccacaagggcttccactgatgccaaccaaaccttcaagagccagacgttggctccgtgaagataaagccaagatttatgccgatgtcaggcgtaatattcgtggtggctgttgggagggaaaagcaactattacttcggctcccttcaaggtgatagccaagccgaatatttatcggcgtcagctacattttgagaatcccgatagtaagaaacctaaccccacgcaataccggaagcgaaaaggtggaacaattacaccctttggttttagatctggagattttgttagtgctgaaaaagcaggacttatatacagaggttgggtgggtggtcacacccaaacagcgaagtcgaaaaacgtttctgtttacgacagtaactggaaaagaatagggcagttttcccctaaaaaagtcaagttactcaagcgttcatgcaagttatgcgtaagctga

SEQ ID NO: 727 - DNA, 224 bp, Symploca sp. SIO2E9
gtcaactactcacggctacttccttgagccgtgagcttgaaagagccagatttcaacaatagttgtctaccgcgagagtcacgccatgtcacacacggcacaatgttctcctagttgtgcctgctgtaagttccctggcaccgagcgctttaagagaggacatgtttggcgtgatggcggtaaggagcaagtaactttctcgtaggattatctccatgcaacga

SEQ ID NO: 728 - DNA, 942 bp, Unknown
  Ga0374055_0154238 JGI
atgtcggttccagtattagatacaaataagaagccattaatgccttgctcggagaagcgagcaagaaaattaatggagaaaggtcaagctaaaccttgctggcaaaaaggtatattctgtattaagcttatgcaagagccatctactagaaactatcagaaggtcgctcttggtattgatcctggaagtaaacgagaaggctataccgtctctacagaaaaagccgttgttcttaacgtgacaacagatacaaaagattggattaagaaacacgttgaagtaaggagaagtattcgtatggcaaggaggcaaagaaagacaccttatcgtaaacgcagatctaatagattaaggaacagagtttttcttccaccatctaccagagcaagatggaatactaagctacagatgatcaagtttattatatctattctgccaataacaatagttaatgtagaagatattaaagctgctactaagaaaggaaaaacgaagtggaacagatcattctcacctattgaagtgggtaaaacttggttctataatcaggtagaaaaacttggagttaagttaatgattatacaaggatctgataccaagatagaaagagacgcaagaggatttagtaaatctaaaaagaagttggactttatttgggagacacataatgtagactctcatatattgtgtgagcttgctttaggtaagcaagttaagccatattttggcatatggaagatagaatttctcctatattatagaagacaattgcagaaacagaatataagtaaagaaggaaagagaatagagtatggttctacagtaagtatgggaatgtcgagaggctctatagtcttgtataggaataaaatgtattatcttggaggatcatctaaaggaagagtaagtatacattctataattacaggagagagagactga

SEQ ID NO: 729 - DNA, 243 bp, Unknown
  Ga0374055_0154238 JGI
gtcaataacctacgacattactcgtaggcttgtgcggagaaacttaaccagtttttctcgatcaagactaaaatgttgtactagacagtatatatagttgatcagctctcgttatggtaagagggtaaagtacatagagaatgtttcgctagttctctttccctacggtcagctatgtcgaagcgagttgaacaaggatgcgtaagcatcatttttagaaaagagaaaaaaaaatgtcggttc

SEQ ID NO: 730 - DNA, 1566 bp, Unknown
  Ga0310147_000821 JGI
atgggctgtatcaagccgggggagacctaccaacctgtatggttgagtatttaccttgagaaaggtggaaagatggtatacgttatatcaaaagacggaaaaccgctcatgccgacaaaacggcatgacagggtaaggatattgctgaaacagaagaaagcatgtgtagtccagagcaaaccgtttactatacagcttttatatgacagcacaacatacacgcaggatgtggcatctgcatatgacacggggcgcacacatcagtccatcacggctattgacagcagcacaaccgatgttttgtactcatctgtgaatcactgccgcaacaaagacgtgcccaagctgatgaaagaacgcaagatgtaccgtatgataaggcgtcataacaggcgccggaagaaaataaggcgtgctattgcgaatcatacttatttccgagcaccaagaaaagtggtacagcctggaactaaggagcctataacagcaaagtatgtcaagccgaagcaagcgcggttcagcaacaggaaaaggccgaaaggttggcttacgccgacagcccgccagttattgcagactcacatcaactatttcaataaagttgcgaagatactgcctatcaggaaggtggtgctcgagtatggcaagtttgatatgcaaaagcttgagaatcccgatatagcaggaaagcagtatcaacaaggtacgctgtacagctacaacaacatgcgtgagtatattatagcaaaacaggaaggtaaatgcctgttatgcggcaagcgcaagatagagcatttgcaccatatagtcccgcgctcaaaaggcggcagcgatacctacaaaaacatagcggggctatgcggcaaatgccatgaaaaagtgcacaaagatcctaaggccggaacgaagctggcggagaaagcagccggcacggctaaggagtatgctgatccgagcatactcaataccattatgccgtatctctatgaatatcttaagtcaaagctcggcgaagagaacgtagagatacgttacgggtacgaaaccgagacaatgaggcggcaactgggcttgagtaagacgcattataatgacagctatgcgctggcgcttatgggagtcgggcatataagccgtatagagaagataaaaccgtatgagtataagcagtacaggcgtcataaccgtagttttacagatgcacaaagggacagactatacaaacaagacagcaagatagtggcgaggaacaggcacaagaaaaccgagcaggaagagccgtcgcttgaagaataccggcaggagataaaaggaactgcaggaaaaaaggaagcgtcacgtgccatatctgggctgaaagtatacagggcagccaagcggatgagaacgcccgccaaagacgtaccgataacaagcggaagcagcgtattgtacaaaggccaacgctttattgtcaaaggcattttacacaaagggcaatcgttgttgttggaaggacatgacggttatgtgtctgccggcagttgcagactgatgacgaggaatacaggcatagtatgcttgtga

SEQ ID NO: 731 - DNA, 208 bp, Unknown
  Ga0310147_000821 JGI
gtcaactactcctcaataaattgaggagcatacagccgcgtggatgctatgttgcatcttaggatgcggtagttgaacaggctggctgatacggctgcgcactccgggatgccactctcagttccggacgctgatgggctgtatcaagccgggggagacctaccaacctgtatggttgagtatttaccttgagaaaggtggaaagatg

SEQ ID NO: 732 - DNA, 1347 bp, Metagenome
atgtcaaccggccttcgggccgagcaagcggagcctgcgggtatccgcgaaggatgtactttgaaagtatttgttttgaacatgcgaggtcagcccttgatgccgtgctcgcctgcaaaggcgaggcatctgctcaaggcaggcaaggccgtggcgaggcgtcgaacgccgttcacgattcaacttcgaatcgctacaggtgaaacgaagcagagcgtgacgttgggcgttgacgccggcacaaagcatgtcggcctttccgctacgacggaaaaggaagaggtctttgcgtccgaagtcgaacttcgacaagacatcacggagcttctggctgctcggctctcgcagcgtcgtgagcgccgctatcgcaagacgcgctaccgtgcgccgcgctttttgaaccgtgtacgctcgaaacacaagggatggcttgccccttccgttgaaaaccgcattcaggcgcacatctcgcgcattgaagcggtttgccgagtgttgccgatcagcaagatcttgattgaaaccgcatccttcgacattcagaaaatcaaaaatcccgaagtcgagggtacggactatcagcagggcgaccagcttggattctggaacgtgcgcgagtatgttcttttccgtgacggtcatgtctgccagcactgtcgaggtcgatccaaggatccgatcctcaacgtgcatcatcttgagagccgcaagacaggcggcgatgcgcccaacaacctgatcacgctctgcgagacatgccacaaggcatatcacgcaggaaggatcaagttgaaggttggtcgcggcacgtcgttcagggcagaagccttcatgggcatcatgcgttggacgctacttgaccgcattcgcaaggcacatcctgaactgcctgtcgaaaacacctacggctatctgacgaagcacaagcgcattatccttggcttgcccaagacgcattgcgccgacgccttctgtattgccggaaacctgaatgcgctgcgacgaggagaaatcctaaaccagcgccagacgcgcaagcacaaccgtcagattcacaagtgtacggtgctctcgaagacgcttacggacggcacgaagatcggataccgaaagctcaatcaaacaccgcatctggtcaagaacttcaggctcttcgacaaggtgagatgtcttgggcaaaccggcttcatcttcggtcgaagatcgtccggctacttcgatgtccggaggctggacggcgtaaagctttcttccggcatcagctacaggaagctcacgcttctcgaaaagagaagcacctatttaaccgaacttagaaacgaggacggcgcttcctcccctgtctga

SEQ ID NO: 733 - DNA, 276 bp, Metagenome
gtcaataacccctgcctgaaggcagaggcttgaaggagcctttattgactagcctcagcgcccctctttcgagaggtgctacgttggttgggaatgtataggcaccgtggaatgtacatcctagttccacgcactgcggcctgtgattaaaagctccgagaggtaagagcggtgttgcaggcaccaaaccccgtccaacattggcgaaggatgtcaaccggccttcgggccgagcaagcggagcctgcgggtatccgcgaaggatgtactttgaaa

SEQ ID NO: 734 - DNA, 1053 bp, Unknown
  Ga0310695_10005296 JGI
atggttccagttttagataagaacttaattccattgatgccgtgtaaagaacgtagagcacgtaccatgatgaaaaaaggtagagctaaaccgtattggagagatggtatcttttgtattatactacaaaacgaaccatctgctagaaactacagcgatgtagttgttggaatcgatcctggttctaaacgtgaaggaattacagttgcaacggaacaacgagtagttctcaatattacgtctgaagcgattactcatgttaaagacaacgtagaaactagacgtacattaagaagatcgcgtcgtcaaagaaaaacaccatatcgtaaatgtcgtgaaaatcgaaaaaataataacaaagacgataaattgccatcatcaacaaaatctcgttgggatgctaaattacgtatacttaaaaaacttaaacaaatacttcctattaccgatgtttcagtagaagatgttgctgcaaaaacgataaaacgtgcgtctaaatggaataatatgttttctcctttagaaactggtaaatcgtatttttacaaagctatcgaaggtctaggtttaatcgtattcaagtggaagggttacgagacgcacgaatggcgtttacaagctggatataagaaaacgtctgaaaaacttaaaaatgcgtgggaagcgcataatgtagatagtcattgtttatgtgaaatggttttaggttattgtataaaaccagtaaagatattgtgtctactatcgtttttacaagtcaatagacgtaatctatttaaacaaactattcttaaacatggagctagaatacggtatggtggtacaatgtcgttaggatttaagaagaatacgttagtaagatatcctaagtatggtttaagtttagttggtggtaatacgaaaggtaagctatcgttacataatatacacaacggtagtcgtctttgtcaaaacgcaaaattaagtgacttaacgattgttagttacaatttaaaatgggttttacaactgatagttcctaaagttgtaaaagcaggctcttcccatgactaa

SEQ ID NO: 735 - DNA, 279 bp, Unknown
  Ga0310695_10005296 JGI
gtcaataacccacgactaaagtcgtgggcttgtgaagaaaactgaaggtggcgcttcaaataactcacaagggtaagaagagactagattcgctgagtggaacaacacacgtttgaaggcaattatacgcagatggaaagccaaccagtgacagaaagacgtattacggatacctccctagtctgtattcaacgtcgcgtataatatcgaagggaattcaatactagaggtgcagttactgctgcacactccgaaaggagaaagatgtttatggttcca

SEQ ID NO: 736 - DNA, 1272 bp, Human gut metagenome
atggtatatgtaatatcaatagataatgaacccttaatgcctaccaaaaggcatggtaaagttagaaggctcttaagggataaaaaagcaaaagtggttagaagagaaccttttacaataaagctactctatagaccagaaaccaatgtggtacaagattgtacccttggtatagatacaggctctaaatatattggagctgccgtagtatcaaacggcgaaatattatacgcatcagaagttaaaacaaaagacgatgttaaaaagaaaatggataggcgtagaaactatagatccaacagaagatatagaaaaataaggtatagaaagcctagatttctaaatagaggtaattccacaaaagaaggtagatataacctaacgcttgtaagtaaatttaattctcatgttagagaaattgaatttatcaaaagcatactaccaataaacaagctagtatttgaagtaggtcaattcgatactcacttgatgaaaaacccaagtttaaataatcccaagataagacattggggttatcaaaaaggaacaaattacggttttgcaaatagtagagaacatgccttaaatagggataaatatacttgtcaatgttgtggagttaaaaatacaaggttagaagttcatcatataatatatcgatctaatggtggtactgatgacttggataatttaataaccctttgtgaagaatgtcataaaaaagtacacgctggaataataactataaacaagaaacctaaaaagttacctaatttcagtgatgcaactataatgtcaatacttagaagtatgttattaaaaagatatccagaggcaatagaaacatatggctatgtaactaaagaaaataggataggcttgggtcttccaaaagaacactttgtagatgcctgtgttattgctactggaggctatgactttgacttgccaaaagagatctttgttaaaagacatgtctctaaaggagattatcagctaacaaaaggttctcgtagtgaaaagaagattcctcaaaccaaaatactgggctttagaaaatgggataaggttaaatatctaggaggaatatactttattaagggtaggcgctctaggggcacttgtgtgctagaagatatatatggcaataaggttgatttttctcatatgccaagaggtttcaaggatcctaaactttctaattgcaaaagaattagtgcaaggaaaacaactttatgtcaaagaatagaatacattccaaaggcaagttaa

SEQ ID NO: 737 - DNA, 341 bp, Human gut metagenome
gtaaactacaacgcccttaaaggaatgttgctttaggttatctaaacaacaaaccttgggatataaggtttaccagactcagtaagtagaaatgtttactacgatatattgatgcacacctttggttgtcgccccagaccattgctctgtggttagcatttaaacagttgcgatatattaaagttgtaagcaacagtgatgctaacgctaaactcaatatatcattgtcgaggggaaggtttaaactatctatggtaaaagtaggtagaaaaacaatacagttcgttatgtactgaattaagttttaaaacataataaagttaagaaaggagtgccttatg

SEQ ID NO: 738 - DNA, 1275 bp, Unknown
  Ga0111054_100026 JGI
ttgaaatatagaagagaacttaaggtaattaaaatggtatatgtacaatcaatccggggcaagaaattaatgccttgctcagaaacgaaagctcgacatcttcttaaagaaaaacgagcaaagattattaattatgaaccatttacgattaagctgttgtttaaatgtgaaaacaaaacacagccgataacgcttggcgtagacacgggttcaaaggttgtaggtctttcagctacaacttctaaaaaagagctgttttctggagaatttgaacttagaaataacattgttaaacttatttctactagagctaaacttagaagaagtagaagaagcagaaaaacaagataccgtcctgctagatttttaaacagaagaaaaacaaaaaagaaaggatggttacctccatctattaaaaataaattaaacgctcatgtaaaaaccatagacagtgttattaatttacttccagtgactaaaataattttagaaactgcaaaatttaatattgctaaaataaataatccagaaataaaagattatacttctggccctcaaaaaggatttgccaatgtaagagcttatatccttgcaagagataattatcaatgtcaatcatgtaaaaagaaaaatgttaaacttcaagttcatcatatcgagtctcgaaaaactggaggaaatgctccaaacaatttaataacattatgtgaagaatgtcatttaaaatatcattccggagatttaaagttaaactttaaaagaggaaaatcttttagagatgcaacctttatgtcaattttaagaaaaagacttccaactcaattaagggaaaagtattcatctatccaaattgaagagactttcggttatataacaaaggcgaatagagaaaaagcaggtctcccgaaagaacatagatatgatgcttgggctatttcaaataatcctaatgcacagcttggttctgagtggtggaaaatgaagcaagtccgaaagcataacaggaaaatacataaagctactcctaaaaagggaggaaaacgtgatttagaacaaagtccatataaaactcatggatatagattatatgacaaaataaaatttaacaatgaaattttctttatcattgctagaagattaaatggctgttttacgttaaaaaatattaaaacaggaactttgcttgataaaatgcaaaagtttatctcattttattcagttagaaataatagtgttttattagaaagaaggaacaatcaatatgaatgctcgtaa

SEQ ID NO: 739 - DNA, 306 bp, Unknown
  Ga0111054_100026 JGI
attatttaaatcatggctaatgcatcattttattattaaaatgattagcctaagtcttaattgactacgttatctaagaataatataggtactcttggagtgttactcctagctccagattctacgatatatggttaaatagttctgatgaatatgaacagtgctgtatgtgcgaccgtccaatattttattagatagtctaaaaccttagaataacattggcgaaggggtcataaccttcttgaaatatagaagagaacttaaggtaattaaaatggtatatgtacaatcaatccggggcaagaa

SEQ ID NO: 740 - DNA, 1581 bp, Unknown
  Ga0272423_1005921 JGI
atgtctacgttgcaggcaagacagaagacccaccaagggatgcttcctcagtcccttgctctggaatccgtgtcagcagacaccgttggggtaacgacgaaacggggcacggacgcgggcaagaccgcacctggcacgcaacatggtcgaggggagaatctgcaccgcattcgccagcgcgcagatcgtcaccgggtaacccccggaagtgggagtaatcccgcaccatcagtgagaacggttcagccgagcgtgttcgtgctggacaagtgcaagcagccactcatgccgaccagccccgcgcgggcgaaacagttgctgcgggccggtcgagcacgagtggtccgactccacccgttcaccattcggttggtggaccgcacccgtgagcactcagcagtggaaggggtgcaaatcaagatcgaccccggtagccggtgcactggcgtctcggtggtccgggtaccaccctcggaggcggtccacggattgttcggtatcgagatccagcatcggggcagacagatcagtaagaatctcacctcccgtgccgcgttacggcgtggacggcggtccagaaacctgcgacaccgggcgccacggttctccaaccggatgacaccgcagggctggttggctccctcgctgcaacaccgggtggactcgacaagctcagtggtgtcccggttgcgcaccatcgcgcccgtcacttcggtggcgatggaactagtccggttcgacctacagaaattggtcaacccggagatcaccggcaccgaatatcagcagggcaccctcgccgggttcgaggttcgcgaatacctgctcgccaagtggcaccggagctgtgcctactgcgaggtcagcggggttggtccccgttcggtgccgatgaacatcgatcacattcgtccgcgcgtcaaaggcggctcgaatcgagtgtctaatcttgccttggcctgcgtcccgtgcaaccaggccaaaggttcccgggatgtggccgagtttgtcaccgaccccgcgcgcctggcccggatcgctgctcaagcccagcggccattggtggatgcggcggcggtcaacgcaacccgttgggtgctgtacgaggcgatcaaagcaacgggcctgccagtccacaccggcacaggcggccgcaccaagtggaaccgagtgtctaacgggctaccgaagtcccacaccctcgacgcactgtgtgtcggtggtatcactggtgttgctgcggtgccgaacgctgtgctggtagccacatccaccgggcgcggcacctacgcccgcacccgtagcgacaagtacggattcccccggctgcggctgactcgacagaagcggcacttcgggttcgccaccggagatcatgtccgcgcggtcgtgtccaccgggaccaacaccggtacctatgtcggacgcgtagccgtgcgcgccagcggcagattcaacatcaccactacccggccagatggaaagtccgtcaccgtccaaggcatccatcaccgacacttccgcctgctcaaccgagccgacggctggagttacacgagaaaggaggaggagcgcatctaa

SEQ ID NO: 741 - DNA, 316 bp, Unknown
  Ga0272423_1005921 JGI
atcaaccaccctgccctgaaggggcggggcttgtaacggagctatccgttcccgaatgagcccagccgctagggctggttgaccagaccaagacatcaagattggaggcgaaacagatgtctacgttgcaggcaagacagaagacccaccaagggatgcttcctcagtcccttgctctggaatccgtgtcagcagacaccgttggggtaacgacgaaacggggcacggacgcgggcaagaccgcacctggcacgcaacatggtcgaggggagaatctgcaccgcattcgccagcgcgcagatcgtcaccgggtaac

SEQ ID NO: 742 - DNA, 993 bp, Unknown
  Ga0116158_10014977 JGI
atggttccagttttagacaaaaataaaaatccgttgatgccttgctcagaaaagagagcaagaaaactattggaatgtaaaagagcaaaacctttttggtataaaggcttctttacaatcattctgcaagaagattcttctggaaacactatgcaggatatttgtgtaggacttgacccgggaagtaaaatgaacggaatgactgtaaaatcagaatcacacactcttttaaatcttcaggttaaggcaagatgcgacgtaaaggaaaaagtagaaaaaagagcaattatacgtagagctagacggcgtagaaattgtccttatcgtaaatgtaggattaaaagaaaaggtcgagagatgccgccatctacaaaaactagatggcagcagcatttaaacatggtcaaactttgttccaatctgtatccgattactcatgtttctgtagaagatgtcaaagctattacaaaaaaacatgcacggaaatggaatgtgaattttagcccgattgaagttggtaaatcatggttttattcagaactagaaaagagttataaactttatactttcggcggatacgaaacatatggggaacgtaatgctttaggtttaaaaaaatcaaaaaataaactagaaaaagtgttttctgcacattgcgtagattcttgggtattggctaataaagtaattggtgggcacgtcaaacctgaatatacaaaggttattggtgttactccgttaatttattataaacgacaactacacgtttttttaccagtaaaaggatttaggaaaaaatacggaggaacatctacttttggaatcaaaaaaggaacgttagtaaatagtaagcgtcacggactttctattattggaggatccgctcgaggagggattagtttgcactctttaagtgataataaaagatttactcaaaccgctaaaaaagaagaacttactgtcttaacaactttaaaatttatattaaaataa

SEQ ID NO: 743 - DNA, 246 bp, Unknown
  Ga0116158_10014977 JGI
atcaactatcccattactgggaattttaggaaaactcttaccaagactaactagaatttaaacaggagaatagcttgcccaagataataaccttcgaaagttattgtcgtttgaaggaaactaagatgataggttgtggtagaccaaaacacatagaggatgcttcccaagtcttctttcaatgtttcatcgagtagcgaagggaaattaaaacaagatgcgtaagcataattttttatggttcca

SEQ ID NO: 744 - DNA, 1362 bp, Unknown
  Ga0207997_1002358 JGI
atggtaaaacaacaacagaagttattcaagagagatacatgcatacctagagatacttctctagtctctggctctatgattagtaatgtaaacaaagaggaaactcttagtcatactaattcaaaaaccttagataacaatctcgaagagaaccaacaccaacaaacaggtgggtttaagaccaaagtgtttgtaatagcaaagagtggaaaagttttgatgccaactactccaagaaaagcaaggcatcttttgaaacaacagaaagcaaaagtagtaacgacaaaaccatttgcaatcaaacttaattgggattgtgaagaaatagtgcaagaagtcaatttaggaattgatactggagtaaaaacaattggttattcagtaacatcaaaaactaaagaattgatttctggagaatttgtgttaagaacaaatattagtaaaaaaattagcgatagagcaatgtatcgaagaaataaaagaaataaactttggtacagagaagcaagattcttgaatagaactaaatcaaaacctaaaggttggttagcaccatcagttcagcataaaattgattcgcatatcagattgattaataaaataaaatctttgattccaataactaaagtaattattgaatcaagtcaatttgatgctcaaaagttacagaatccagatattgaaggaagtgaatatcaaaatggtcaaatgaaagatttcgagaatgtaaagatgtttgttagacaaagagataaatacacttgtcaaatctgtaagaaaaaagatgataaaatgttagatgttcatcatatcaaacaacgaaaagatggtggaagcgatagaccagataatctgataacattacatcaatcatgtcataagaaatttcattctggtaaaatcaaacatgtatttgtcaaaccaaaatcattcaaagaaacttcaatgatgaatagtttatggtcaagattgaaatatttagtagattgtactgaaacatttggttatattaccaaaataaatagaaaagaattaggacttgaaaaaacacattataatgatgcgtttgtaatttctggtggaactaatcaagaaagatgtcaatcaaatgtttcaaaacaaattagaagaaataatcgacaattacaacaaaatagaaaaggacaaaaattggcaatcagaaaagaacgatataaaatacaatctggagatattattttatatcaaaataaaaaattaatttgtaatggaatgtttaatttaggtaaatatgtaagttttgtaaaaaatatatttaatataaaatatgcaaaaataaatgatattaaggtattatattatggtaaaggaatcaaaatataa

SEQ ID NO: 745 - DNA, 264 bp, Unknown
  Ga0207997_1002358 JGI
gtcaatcacctcgccctaaaggacgaggcttgagaagtgattttcaagagtaattggttgattagagagttgaaaaatggtaaaacaacaacagaagttattcaagagagatacatgcatacctagagatacttctctagtctctggctctatgattagtaatgtaaacaaagaggaaactcttagtcatactaattcaaaaaccttagataacaatctcgaagagaaccaacaccaacaaacaggtgggtttaagaccaaagt

SEQ ID NO: 746 - DNA, 540 bp, Unknown
  Ga0101770_1107140 JGI
gtgcaagattgtatattaggaattgacgcaggaagtaaacatataggaatggcagttataactgaacaaggtaatgtgctttatcgtgccgaagcagaattaagacaagacataaaagagaatattgaaacaaggagacgacttcgacgtgcaagacgtaatagaaaaacaaggtatagaaaaccacgttttttaaacagaaaaagaaaggaaggctggttaccgccaagtatacaatcaagaattaatgctcatattagattggttaatgatattgtaaaaattttacctataagcagaataagagtagaaatagggcaatttgatacacaggcattagttaatccagatattaatggtatagaatatcaacagggagaaatgcatggatatgatagcgtaaaagaatatgtaaaaataagagataattttacttgtcattatgcaaaattaagaccagacataccttgtaatgatattcttgaagtagaccatattataccaagaagcaagggtggtagcaataatcaagcaatttag

SEQ ID NO: 747 - DNA, 240 bp, Unknown
  Ga0101770_1107140 JGI
gtcaactaccccaacctatagaggttggggcttgtaaaagctcaagttgactagactaagtgccgaataagcactacgttattctccatgtagacaccgtagaatgatgccctagttctatgctctgtcgtggctctgtaaacagtcctgtgaggtagggacagtcaaccacgttgtgaagggagaataacattgtcgaagggcaaataactccgaaaggagggcttaagccaattgtta

SEQ ID NO: 748 - DNA, 930 bp, Unknown
  Ga0307373_10069487 JGI
atgccggcagctgtcttcgcggcggagatcaagcacaagcccggcatccacgcaaagatgctgcgccgggcgggctaccggcgccgccgccggtcggccaacctgcgcgatcgcgcccgacgtttcgccaaccggcatcccgagccgtgcatcgtctgcggcggcaacgcccaacacgggcgcaagcattgccggcgatgcgccgaggccgggcgtgaaccggacgagttggggcggcgggttccgcgcctagcgccgaccctgcggagtcgtgtggacagcacccgctcctgggtcgcccggctgcgccactgggccccggtgacggcggcatcagtgcagttgggccgctacgacacccaggccctccaaggccccgagatccggggcgtcgagtaccagcacgggaccctgctcgggtacgaagtgcgggagtacctgctggagaagttcgggcatcgctgcgtttactgcggtggcctctcccgcgaccctgtgctcaacatcgaccatgtggtgccgcgcagccgcgggggcaccgaccgcgtctccaacctggcgcttgcgtgccgctcctgcaacgaggcgaaggacgatcgaccgcccgaggagtgggcggcgcgcctggcacgcctgcattccccgttggccgtcgcccggacggcgggatgcgcggccgtcgtggggcgcctgcaggcgccgttgcgcggcccggctgccgtcaacgccacccgctgggccgtccggcgcgtcctgggggagacggggctgcccctggaggcggggaccgctgctcgcaccaaggggaatcgcgcacgcctcgggctgccgcggagcccgtccgccgatgcggcgtgcgtgggcgcctcgacgccggctgcacggcgctgggccgggaaggcggtcctcgccatcgcggcccagcgccgg

SEQ ID NO: 749 - DNA, 298 bp, Unknown
  Ga0307373_10069487 JGI
gcccgttgacccctggatgcttaccaggcccagcgccagaggttggcagccgttgagggcgctacgttgccgccaaggtccaagacccaccccgggatgcttcctcagtcccgggctctggaaccggccgcagcagacaagccccgtgggcaggggcacgagacgggcggccggatgcgccgggcggtgacatggccgaggggagcggatcgggagcgccagcccgatcccgtcacacaggccccgtaaggggcgccccgcaagaggacctgatcgcgaggaagggggcgcgcccgtg

SEQ ID NO: 750 - DNA, 417 bp, Human gut metagenome
atggaagttaggcgaaactatagacgttaccatcgttatcacaaaagatatcggcaggcgagattcgacaatcgtaaatcttctaaaagaaaaggacgaattgctccaagtattttacagaaacggcaagctaccataagagttattaatcggcttaataaatggataaatataacaaattattggctggaagatgtttctattgatatccgggtattaacagatgggtataagtcttatagctggcaatatcaaaaatccaacagactggacgaaaatatccgtaaagcaacgattctaagagatggcggtaagtgtatggaatgcggaaaatctaattgtagattagaggttcaccatattaagccaagaagacgaaatggttctaatacgttagacaatctgattacattatag

SEQ ID NO: 751 - DNA, 289 bp, Human gut metagenome
tatataaatgtaaataagagtggacatatgaaatctcttatctatagcttaacaataggtctcaagcctaagtgactgctactgtcgaaagacatgttgcagataggaactatgttaagtagtaaggtaaagacacacctttagatgtaatcttcagtctgaagctctgtgagtacaaaccaggaaacaatgctaatgtcctgcattgataacagggaaacacatatcctctacttgactttggcacgaagagcaattctccgaaaggaaggtgtcagaaatgacaagt

SEQ ID NO: 752 - DNA, 1398 bp, Human gut metagenome
atgagcacttgcgtttgtgttctcagtaatagtgatgaacgcctgatgccaaccatccgtcttggcaaggtgcgccacctcctgaaagacggaaaagccaaaattgttaagcaccatccgtttaccatccagctgttatatgacagcgaaacgaatgttcaacccatcgaaatctgtgaggacgtcggctacaactacattggaatcagcgtgaaaagtgaatctcatgaatatgtgtctgctcagtatgatacattgcaagacgagaaagaacatcacgatgactgccgtatgcatcgccgtacacgcagaaacagattgcgctaccgtaagcggcgcttcgataaccgcaagcgcgacaaaggttggcttgcaccttctctagaacacaagaaacagctgaatatcagtcttatcgaacagtatgtatctgtaattccgattactcacgcaacggttgaggttgattcctttgacacgatgctgctgcaagctatccagaaaggcgaagcgaaaccggaaggcgtagactaccagaagggtccgcgttataacttagctacactacgtgaggcggtattctaccgtgatgattacacctgccaggtttgtgggcgtaaaattacggatggtgccatcctgcacatgcaccacatgttctactggaaaggcagacatggcaatagtctcagcgagcttataacagtatgcgagaagtgccatacaccagctaaccatcaaaaaggcggcaagctctacggatttggtgaagatataaagttcgccaatctttctggtgcggcattcatgaacaccgtgcgctggcaaatcgttaatgtactttacgctgcttttggaaagtcgttcgtcacattcacttatggtgcgatgaccaaagaaaagcggattgctcttcatcttgaaaagagtcataacaacgatgcgtatgcaatgggcagctttcatccagttaaccgctgcgcgtttgaacattatgaaaaggtgaaacgcaataaccgcattctcgaaaagttttatgactcgcagtacattgacactcgcactggtgaaaaggcaagtggaaaagctctctttaacggaaggattaaccgtaatcataaaaaggattctgaaaacctgcacaagtatcgcggaaagcggttatataaaggacatcgcgccttagtgcgcaagaaagtgaacctcaatcctggtgatttggtttcttttaacggcgaagtccttgttgttcatggcactcataccaataaaaagggtgctgtaaatgtagaattcaaagtacccgcaaaaaacggtcaaaaatccgcgagccttaaaaaactcaaaattgtaaaagcagcagattccatacatcccgcatgggaaaaagtatcttaa

SEQ ID NO: 753 - DNA, 326 bp, Human gut metagenome
gtcaacaaccacgcctaaatcggtcagtcggttatagacgggacttgcggggaaacccgtaagtctggttggttagcctaagtctgctgctccggtagcaggaaactacgttgtgtactaataatataggcaccttactcatgctccacaagtgataagctctgcggacggctcgttaaacatctctgagggtaggagaagtgcgaacgtcatgtcgagaggctaaaacagtacaacaacattggcgatgtggaccacagggcgcaagtcctgacttatagttatattactattttacgaaaggagtatcttgcatgagcacttgc

SEQ ID NO: 754 - DNA, 1566 bp, Human gut metagenome
atgtggctgtgcccaggttatggcaacacaacagggacatgttccctggcttacagcaaaggagatacaatgaattatgtttatgtactggatcagcggggaagcccgctgatgccgaccagacggtacggttgggtacgcaggacattaaagtccggcaaggcgaaagccgtacgtactttaccgtttaccattagactgatgtatgatccggatacaacaaagatacagagccttaccctggggattgatccgggaaggaccaacatcggcatggcaactgccgatgaaacaggcagatgtctgtattcttcccagtgcgaaaccagaaaccgggtgatccccagactcatggaaaaacgccggcagcaccgacaggcatccagaaggggagaacgccttgcgaggaaacggctggccagaaagcttggaaccactatgagggatatcctggaacggatgctccctggctgcgaaaaaccagttagggtgaaggacatcatcaatacagaatccaggttcaacaaccgacgccgtcgggaaagctggctgacaccgacggcaacccagcttcttaggactcatctgaacctggtggaaaaggtgtgccggatccttccaatcagcgggattgcactggaagcaaaccggtttgcatttatggagctggaagcaggcggccatctggaatccggagtggattaccagcgcggcccgctttacggatatcgcagtattcgcgaagccctggaagaacttcaggacggaagatgtcttctgtgtggcgaacgcgccattgaacatgaccatcatctggtccccagatcaaagggtggaagcgacactatagccaatatggctggtttgtgtgaacattgccatacattggtacataccgaccagactgctgcggagaagctggaaaccatcaaggcaggccagaacaaaacgtatggagtcttatccgtactgaaccagatcattccgtatctggtagaggctctgtctaagaaattcaatgggaacatccgtctggtatccggttgggagacaaagcagttccgggacgaaaactatatcgataaggaccatggcattgatgcctactgcattgcagtaatagggcaacatcccaagaaaattgatgtcccggaaacccattttcagatccggcagttccggaggcatgacagggcacgaattaaatcccagaccgaacggacttaccggctcgatggagagaaagtagccataaaccgccggaaacagttggaacagaaaacggattctctggaagactggtatcaaaaaatggcagcatattacggccgccaacaggcagaccggatgcgttccaagctgcaggtacaaaggagtaccaggcggtataacaacccaaaccggctgctgccgggaacagtttttgtatatcagggaaaggcatacatcatgaccggtcagctgacaggaggacagtatttcagggccgcaggatgtgacaggaaaaacttttctgccagaagtgcccaaatcgtgagatataatcagggactggtatatgtataa

SEQ ID NO: 755 - DNA, 211 bp, Human gut metagenome
gtcaactacccatccgctaaagcgaatgggcttgtaaaagcccagggactttacaggtgagcagttgagcagaaccgtgacgcagcaggttcgccctatcactccgggatgacgccaagttccggacactgagatgtggctgtgcccaggttatggcaacacaacagggacatgttccctggcttacagcaaaggagatacaatgaattat

SEQ ID NO: 756 - DNA, 1383 bp, Mouse gut metagenome
atgtcatatattgcttttgttatagcaaatgataacagtagacttatgcctacaagaaaccctaaaaaagtaagaaggctactaaaagaaaagaaagctattatctattcttatgaaccttttaccataaagcttttatataaaagcgaaaaatgcacacaagacatagagctatgtgtagatataggctataatcatcaaggaatgtctataaaatctagaaaacaagaatttgtttccgaagaaaggacatttttattagatgaaaaagataaacatcaagaacaattaaaaataaggcgtgctagaagaaacagacttcgttacaggaagcctcgttttgataatagagctattcctaaaggatggatagcaccatcacttagacataaaaaagaagcaggaattaatgtaatacttaaatattgtgaagttttacctattacaagtataactttagaagtaggtaactttgatactcatgctattaaaaaataccttgaaaatggagaaattttagaaggtattgactatcaacatggagatacttatggctatgattccctaagagaagctattttttctagagataattacacatgtgccatttgtaaaaaaggaataaaagataatgtaatacttagaatgcaccatataaattattataataaagataggtctaatagaccaggtaatcttttaacagtttgcactaattgtcacaattctaagaaccatggcatagatggcgctttatggggcttaaaacctaaaacagattctttaagagatgcagcttatatgaatattgttaaatattcatttaaagaagacttagaaaaaagtttaaagaaattaaatttagaaacacctattaatattacttatggagctgttactaaaagacaaaggttaaaattaaatatacctaaaactcatgcaaatgatgcttattgtatgggaagctttagacctaaatacaaaataaaaacaagatactttaaaaagataagacgaaataacagaaaattagagaaattctatgactctaaagttcttgatacaagaacaaatgaatatatgaaaggaaatgagctttcctgtaataggactaatagaagtgtacctagaaacaatcctttaaacgaaagaatttatagaggacccaaaaaatcaaaaggtaaaagagttataagaaaaactcactataaatataaatcaggagatatagttaatataaaaggaatgaaaggacattatctttgtaaaggtattaataatttaggtaaaacagctaaaatattagtagataacaaatacatatatccatctacctctaaattaagtattcataaatatagtaatggatggatagaaacataa

SEQ ID NO: 757 - DNA, 286 bp, Mouse gut metagenome
taaagaaacgtagattcttatatatttataattatatctactacgttatattagaataacaaaattattttaattttgtaatgatagttaccaatagatacttcacaagtctattgctctaaggtatggtattaaaaacttctgaggtaaggaagcgtgtactatacataaaacctaatataacattggcgttgtgaaccacactcgaaagagtagatactttaaataagacttatcttatttaaagaaatccgtaaggaggtaaataaaaatgtcatatattgct

SEQ ID NO: 758 - DNA, 1368 bp, Unknown
  Ga0256404_1004876 JGI
atgtctgttgcagttatcagtaagaccggcatccgtctgatgccgacaagtgaatatcgggcgcggcatctgcttaaatcaggtaaagctgtcattgaacagtaccgcccgatcttcacaatccgtttaacagaaagagaggacggcgatacacagccgatcgagtatgccagtgatactggctaccagcatgtcggcgtatccatcaaatcagagaaacatgagtttgtacatgctcagtatgacatgctgagcaatgagaaagaacggcatgacaagtgccgcaagtaccgcagagaaagaagaaacagactgcggtacagaaagccgcggttcagaaaccgcaagccgaagatgacaaaaggcgaagtactggcgccttctctgcagcatagagttgataaccagacaatgttgttcgactcgttctgcaaagtaatgccaatcaccagtgccacatttgagatgggcaagttcgacacccagttgttgcaggcaatggcagatggcagtctgctccccaagggaaaggactaccagcatggcagtaagtatctgtatcagacagcgcgtgcagctgtatttggcagagacaactacacgtgccagatttgcggccgttccatcaaagatggtgccattctgcatacccatcatattgggttctggaagtcataccgttccaaccgtgtcggcaatcttctcactgtctgcgagaagtgtcacacggcaaagaatcacaagcctggtggaaagctctggggcatagaaccaaaagtaagcaatcttgccgaggcaacgttcatgtccgcagtacgctggcggatgtattacgcactggtgctggcacatccagaggtcgatatccacattcagtatggtgccaaaacagcggcagttcgcaaagaacggcatattgccaagacacatgcgaatgatgcttactgcatcggtcagttccatccgaggcaccgctgcgaagaagtgttgtttgctaaaagaagacggaacaaccgtgttctgacaaagttctatgatgccaaatatatcgacatccgtgacggcaagaagaagtctggtgctcagttgtcatgtgacaggactaatcgtcgtgaaagcagacacacggaaaagaacgaacgtatctatcgtggacaaaaggtttccaaaggcaagacatctatgaggaaacagcactatttgtttcagccaagcgacattgtgctttggcaaaatgccaaatattcagttaagggcacacattgcaatggcacaagagtgttgttggaaacagggaaatcggtcaagttggctgatttgagaattattaaaagacaaggaggctatgtggctcctcccaccgcctaa

SEQ ID NO: 759 - DNA, 365 bp, Unknown
  Ga0256404_1004876 JGI
gtcaactacccacggcctaaaggccggtgggcttgagtgggaaatcatttaagctcggttgattagcctaagtgccttgagcactacgttgccgctagctacgctgggatgctccacaagtcccagcctcttgggatctgttgttaaaaacctctaagggtaggaggcgtgcagcagatgtattcgaccagcggacaacattggcgatgtggactaccgttactgcgatccttgtgatcgtaagtgcgagatgccgcaggtctgtatgactgcggaaagtgtaaacattcttctccgtaaggagacctgaaggtcagcaatgctgaccggaacgcgaaattgaaaggaggcatcagcatatgtct

SEQ ID NO: 760 - DNA, 1299 bp, Unknown
  Ga0164242_10000399 JGI
atgccgtgctcggagaaacgagcacagctcttgctggagcgcgggagagcccgtgtgcatcgcgtgaagccatttacgattcgattagtggatcgtttcgttgaagactcggagcttcagccggtggagctaaagctggatcccggctcaaggcataccgggatggcactcgtgcgcgatgatcatggggtcaagcattgcttgaatctctaccagctcgatcaccgcggacatctgatccatcgcaagctcctgcaacgagcagcattccgacggaatcgccgtaatcataaaacgcgatatcgccctgcgcggttccataaccgtacgcggctgaaaggctggcttccgcccagtctgcagcatcgcgtggatagtaccctgagttgggcgcgtaaatttcaacgctcactcccgctcacgaagctggtcgtcgaaagtaatcgcttcgatacccagctgatggacaatccggacattcaaggacgcgactaccaacgcggcagtctctgggactgtgagctgcgcgaatgcgtattcgcgaaatggggctatacctgcgtctactgcggggtgtcggcatttgatggcgatgggctcattatggaattggatcatttctggccaaagtcgaagggtggcagcgatagcccccgcaatcgcgtgccggcctgcgtccgatgtaatcggcgaaagagcaatactcttccggcgatatttctcattgatgaaccggagaagcgagcttggatagaggccggactcaagactccgctcaaggatgctgcggccatgaatgccacgcgctacaagctcgtggaagccattgagcgactgggcctaccggtcgaaacgagtacgggtggtcgtacgcgctggaatcgccaacgattcgatgtcccgaaaactcatgcgttggacgcgctctgcgcgggcaatgtcaacggagtcaaggactggaaggggaaaccgacacaggtgattacgtgcatgggtcgcggtaggtactctcgaactgccaacgataagcacggtttcccgcgcggataccttgcgaggcataagcgtcattttggcttcgctactggggacttggtgcgcatttcaaactctcttaagaaatccacaagtagagctggagcacgactcaactccatataccggatcactgtgtcggctaaaggagactttcgcctcttcatcagtggtctaaagtactgcgttcactattcaaggtgtagagtggtgcaacgtagtggcgggtatcatttttccaaaataatgaaaggtgttatgtga

SEQ ID NO: 761 - DNA, 292 bp, Unknown
  Ga0164242_10000399 JGI
gtcgtatcccattcctcatgcaaaggagaacctagtggcaggtttccgaacctagtttcatcaggaaaccagactcagtgtgaccttggtcacactacgataccttagaatacataggcactccgggatgcctcctcagtcccggactctgcggcttactgttaaacagctgtatgggtttaaggcagtgcagtaagcgtataaaacctaaggatatccttgtcgagaggagctcggtccctgagaccggcgtcacaatgaggcccgtaagggcatcggagaaatcgtgagt

SEQ ID NO: 762 - DNA, 723 bp, Human oral metagenome
atgttggtatatgtattaaaacaaaatggacaaccttttatgccaacggcacgctttggcaaggttcgtagattattaaaaacaaagaaagcaaaggttgttcgtagagagccgttcactatcaaactactttatgaaccagaaacagatgtggttcaagagtgttattgtggtgtggatacaggctcacgacatattggtgtagcagttgtcagtaatgacaaaatgttataccaatctcaaaccgaattaagaagtgacataaaacgaaaaatggatgctcgtagaatgcataggcgtaatcgcagaagtagaaaaacacgctatagaaagcctagatttctaaatcgcagtaattctacaaaaagtaataggctgccaccttcagtcaaacacaaggctcaggctcatattgacgaaattgagttctgtaaaaagatacttccagtttctgatctgattgtggaaataagtcagttcgatacagctttaatgaagaatccaagtctgatcagtgagaaggtaaaacattggggttatcaacaaggtttcaattatggttattcatccagacgagaagcagttcttcatcgagatcactacacttgccaatgttgtggcaaaaagaattgtagactagaagtgcatcacgttcaattcaaaagcaacggtggtacagatgatgaagagaatctcattacattgtgtgaagatttgtcataa

SEQ ID NO: 763 - DNA, 340 bp, Human oral metagenome
gtgaagctatgctcagctaaagactgaccatcttctggttagtcattagttgttgcttcacaagtcttaggttagagaaatcttacctacgttgaattgaagaaccataaggttactcacctacggttgtcgccttagaccgttgctctgagtctatacattaagttggaaggatagcattgagttcttgtgtgtatagattaaaaattcaattcaacattgacgaaaggaagcccaattcttaacttggtaatagagctaagataggcactacagtctgataagtgctgtcttatagagtaaaacttatcatcaacgaaaggagcgaagcgtaatgttg

SEQ ID NO: 764 - DNA, 1269 bp, Unknown
  Ga0318466_10005777 JGI
atggtatacgtgataagcaaagacggacatcctctcatgcctactgtaaggcatggcaaggttcgtcgtttactgaaagaaaacaaagcaattgtagtaaaaagatgtccgttcaccatcaaactaacttgcgacacgcctgacatcgttcaggaagtcacgctcggcgtagatgccggatcaaaacatatcggtctgtcagctacaaccgaaacgaaagaattgtacgcttcggaggtcgagcttcgcgatgacataagcaagctcctcgaagcaaggcgtgaataccgcagctcgagaagaaaccgcaagacaaggtatcgcaaagctcgtttcgaaaacagagtaaagtcaaagcacaaaggatggcttgcaccgtcagtcgaggcgaagatcggaacgcacgtccgcattatcgagaatgtatgcaacatacttccgatcaaagatatcactgttgaagtcgcatcgttcgacacgcagaaaatgcaggatcccgagataacaggcattgagtaccagcagggcacgctcatgggttatacgattcgcgaataccttgcggagaagttcgaccacaaatgctgctactgcggcaagcctcaaggtaacggtgcccgcttcgaagtcgaacactttactccaaaatcgagaggcggatcgaaccgcatcacgaacctcggctggtcatgccacgagtgcaacgaagcaaaaggtaatctcacctgtgaggaattcggtcatccggaagtacgcaaaaaagctgaagccggcatgaaacatgccgctcacatgagcatcatgcgctggacgctgtacgaacgcctcaaagccatctacggcgaacggcttcatctgacttacggatcgacgactttatatcttcgacatgaggcaggactcgaaaagagccacataaacgatgcgcgctgtatttcaggccattctgctgccgagcctgccgaagaatacttctaccggaagaaagtgcgccgccacaaccgtcagatacacaagctgactattcagaaaggcgggatccgaaagcgcaaccaggcaccttacgaagttaagggattcaggcttttcgacaaggtaaaagctaaaggcagcatgtggtacatccacggcagaagagtaaaaggctcattcgtactcaaaacacttgaaggtgaaaagcttgaaatcgcaccaagtaagataacgctaatagggcatcaaagtgcttatataacagaaaggagaacggcgctcctacccgccctttag

SEQ ID NO: 765 - DNA, 287 bp, Unknown
  Ga0318466_10005777 JGI
gtcaaccacccaccgcttaggctaacgccttgaagcgggggcttgtgaaagcccggttgactagcctaagtcttagctgactacgttacgagagaatatataggtaccctggagtgtaatacctagctcctcgcaatacggtatgtgattaaacagttctgacgggtaggaacagtattgcatacgcaaaacctctcgataacattggcgaaggtatcactacagtccgtaagtactggcttaccgcataaaacttacaaaaattcagaaaggagtcgtgccttatg

SEQ ID NO: 766 - DNA, 1383 bp, Unknown
  Ga0118733_100054452 JGI
atgccttgtagaccagctaaggccagacatttgctaaaggctggtaaagctaaggttcttaacagattaccttttaccattcagctattacaagctactggtgaaactaaacaggaactaattttaggtttagatcctggttctaaaacactaggaacagcggttaggttgattaaaactactaagatattttacgcttctaatgtaacttttagatctgatattaagaaaaaacttaaacaaagaagcagttacagacgaactcgaaggagtagaaaattaagatccagaagatgtaaattttatgggatgtgtaaaacttgtaaattgaaatttacttgtgggtttaggcttaacagaattaaatttaaaattaataaaggcaaatgtgaattagaaaagaaaaataagaaaaatggttttagttttggtagaaaaccagggtggttacctccttcggttcaatctaaagtagattctactattaaagaaattaattatattttaagcatattacctgtaaaccacgtaatctatgaatattcagcttttgatatccataagcttaaaaatcctgatgttaagggaattgaataccaaaaaggtgatatgtatggctatgaaaatactaaaagctatatattatcaagagataattacaaatgtcaaagttgtaaagggaaatcaaaggataaagttttacaggttcatcacataattcatagaaaacatggaggtacggataaaccagctaatttaattactttatgctctatttgccatgataaattgcataaagggaaattaaaacttaaaactaaaaagaaattaattaatactatagatgctactcaagtatctattattaacaaaagaattagaagttatttatttaaaataagaaaaaaatataatctaaaagtttatagaacctatggttatattaacaaagttaaaaggaaattacttaatttacctaaagatcactatttagatggaatattatgtacttatcctaagagggataaatattctaacagatcaaaacctaagattttaaatttctataaaaaagtatcagttcctaaaggcgattacaaacaaactaaaggcagtcatagccaaatatctatgcctacagggaaaattcatggttttaggaaatttgatactgttaggtatttgggtaaaaattatttcatcagaggtagaatgagtactggctatgctaatttaatgaatattgaacaaaaggtaattaagattaggccaatgcctaagtttgaaaaaattaaaaaaataaatgctgggaaaacaataattgtcgattcatcccctcccttcgtttcactcaggaaggggtcttctcgacaggaaagctaa

SEQ ID NO: 767 - DNA, 230 bp, Unknown
  Ga0118733_100054452 JGI
gtgaacaacccccaccttcgcctaacggctcaggaggggcttcaccagattaagcttaaagaaatttaagctacatagtttagcccagcgaggtaaaggaataccgcctcagttcctatatacttcctaagctaaactgtattgtcgagaggaagtcttaaaaattagctggtaacaggctaatgagtagagcattaccctaatttattaggagagaacaaaacttgaga

SEQ ID NO: 768 - DNA, 1329 bp, Ktedonobacter sp. 13_1_20CM_4_53_11
atgtcaaaagtgttgctcctggatatgaccaaacagcccttagacccagtgcatccgggccgagcacgcctgttgctcaaagagggcaaggccgccgtgtatcgcaggtacccctttaccctcatcctgaagacgcaagtggactcccctgcggtgtctgccctgcggctcaaacttgatccaggggcgaagacgagcgggctggccctggtcgatgacgcgagcggggaagtggtgtgggcggcagaactcggccatcggggagccagcatcaagaagcgcatagatgcccggcgtggcgtgcggcgcaagagacgctcacgtttcacgcggtaccgcaagccgcgcttccacaaccgcaagagttccaggagaaaagggcggcttccgccctcgctggaaagccgggttgccaacatgctgacctgggtagggcgcctgaggcgtttgtgccccattgaggtgatcagcatggaactggttaagttcgatatgcaggccatgcaaaacccggagatcactggcgcccagtaccaacaaggggaacgcatgggctatgagacgcgggaatacctgctcgcaaagtgggggcggcgatgcgcctactgcggggctgaggatgttcccctggagattgagcacatcctctgccgcgcacgaggcggcacgcatcgcgtgagcaacctcaccctggcctgcgagccgtgtaacgtcaagaagggcacgcaactcatcgaggatttcctgaacaagaagccagacgtgttggcacgcatcctggcccaggcgaaaacgccgctcaaagctgctgccgccgtcaatgcgacccgctggcacctctttgaacggctgaaggcgaccggcttacccctggagaccagcagtggcggtttgaccaaatacaaccgggcgaagcggcatctgccgaaaacgcattggctcgatgcagcgtgtgtcggccagagcaccccacagcctctggaaacgagccaggtggttcctttgctgatcgaagccaccggtcatggcaaccggcaaatgtgcggcgtcgatgagcatggctttcccatccgccataggcagcggaagaaggtgcatttcggctaccagacgggtgacctggtgcgggcggtggttcccacgggggcgagggcggggacgcatgttgggcgcgtgctggcacgagccagcggctctttcgatttgaggaccaaagctggacgccaggccgggatcagttatcggtattgccgtcccatccatcgcaacgatggctatcgttaccagcaaggagggcggcatgcagtccccgccacccaatccacctga

SEQ ID NO: 769 - DNA, 290 bp, Ktedonobacter sp. 13_1_20CM_4_53_11; identical to SEQ ID NO: 121

SEQ ID NO: 770 - DNA, 1278 bp, Unknown
  Ga0272449_1005167 JGI
atggtgtacgttatttcaaaagatggtaaaccacttatgccaaccaaaagacatggcaaagtgaaaagactcttaaaacaaggtcttgctaaagttgttagaagagaaccatttacaatccagctgttatatgatactacaacctatacacaacctgtcacagttggtatagacattggttcaaaaacagctggtatttcagcaataacggaaaagcaagaactatttagtgctgaaattgaactcagacaagatattaagaagttattgctggaaagaagggagcatagaagattcagaagataccgcaagagaagatatagagaaccaagatttttaaacaggcgtagacatgagaattggcttgctccaagtgtacaatggaaagttgatgcacatgtcagacttgttaactttgtagccaaaatactaccagttacaaaagttgtacttgaagtagcaccatttgatacacacaaaatactgaaccctgaagtaggaggcagcaaataccaggaaggaccacaaaagggtttttgggaggttagagaatattgcttgtggcgtgcaggatataaatctgaactgtcaggcaaaaaaggtgtgttggaagtacatcatattgttcccagaagtcagggtggaacggataatccctctaatctgatagtgttaactgctgaggaacacaaagcaatacatgaggggaaaattaagattccacgcagtagacttgaaaaagttaaaattctaaaagacgcaagttgtgtatccacaataggatggcatatagtgaacaaattaaaagaacaatatgatgttcatataacatacggtagtattacaaaagcaaaaagaatagaaatgggattggagaagacgcatagaaacgatgcgtttataattgcaggtggtagtagagatattaacagagcatctgagtggtattttggtaagtttttcagaagacagaaccgctccttgtacaaagcaaacccaattaagggtggtaaaagaccagtaaatactgtcaaggaagtacatggttttagaagatttgacaaagttgagtaccaaggtagaacgggaattattttaggattaaggagtagtggatattttgcaataggttctctgactggggagaagatatgtgatagtgtaaagcacagcaaactaagacttttagaaaaagcaaagacattaatgttcaaaaggagggaagagcgcattcctctccatcttggaaaagatggagtctcctgcgctcaattatga

SEQ ID NO: 771 - DNA, 256 bp, Unknown
  Ga0272449_1005167 JGI
gtcaactaccacccacctgtagaggtggtggcttgtgaaagccatagttgactaccctcagccatggggaaggttaacttcccatcgggctaagttagactggtcatgacaccctgggatgctgctcaagtcccaggctctgtcgtctgccattaaacagtcctgagtggtaggggcagtgtgacagacatgagaagccagtctaacattggggatgagcacctaactcctaaccaaaggaggcttaccgcatatg

SEQ ID NO: 772 - DNA, 1038 bp, Human oral metagenome
atgttagtatatgtgttagataaaaacggacaaccacttatgcctacacataatggtgctaaagttcgagttttattaaaacaaaatagagcaaaagtagtttcaaagtgtccgtttacaataaaattattatatgaaagtacaacatttacacaaccgcttactttaggagttgatacaggttctaagtatgtaggtagtgcagttatcaatgatgtaacagcagaagttgtttacgaaagtcaattagagttaagagatgacatcaagtctaaaatggatagacgtagagcgtttagaagaagtagaagaaacaaattacgttatcgttcgaagaggtttaataaccgtaaatcttctaaatatagagactgttacacaccaactcttatatccaagttacaaggtcatacaagagagataaaatttattaactctatacttccaattagtgatattattttagaagtgggagagtttgacacacatctattacaagacccaacgttagcatatcgtaagtggggttatgcacagggagaattataccaacaagagaactttaaacaggcaacaaaagcaagagacgactacaagtgtcaatgctgtggtaagaagaactgtagattagaagtccatcaccttttacctagaagtagaggtggaagtgataagttagtgaacctaattactctatgttccaactgtcatcacttggcacacagttcagaagaacagttattagcatttcagaagagatttggtaaaaaggcaaaggatatgttgaagtatgctactcaaatgaatatattaagacacgtgttgcaacgagaatatcctgatgctaaattgacctatggttttattacgaaggaaatgtgtagagtgtttgggttagaaaaatctcatataatagatgcttgctgtatcgctagtagaggagttttgtttaaaaatagcgactcaaataagtataagaagaaatgtgttgcaaaaggtgattatgcctatcttagacacagagtacgtagaagatga

SEQ ID NO: 773 - DNA, 336 bp, Human oral metagenome
gtagacttgtttgacaagtatgattggagatggtgatataccgagcactagtttttactagtaatcaccatacagactaagtattcagaaatgaatactacgttattaaggtcatgacacctccagatgccacctcagttgggagcaactgtcgctatgtattaagttggattgggtatgtaagagtcctgtgtacatagtgtaaaaagcctttataacattgtcgagaggaagtcggatttttgatatggtaacagtatcaaaatacgcattaccacctgtaaaaaggtgagttagttaattttatttttaaaagaaaggagtgtcattatgtta

SEQ ID NO: 774 - DNA, 1308 bp, Lactobacillus sp.
atgcaaaatcgggtttttgtcatcaataaacatggtgaagctttaatgccttgtaagccaagaactgctcgtaaattgttagcccaaggtaaggccaaacccattaagaaagaaccattcaccattcaatttttgtatggtgcaagtggttataagcaacctattaacttaggtgttgatagcgggcaacgtcacattggacttgcggttacaagtcaagataaagttttctttcaaagtgaagtcgaattgcgccaagacgttaagaaattgcttgataccagacggacttatcgcagaagtagacgaaatcgcaaaactcgctatcgtaaagcacgatttttaaatcgcatcaaaaatagaaaaaataattggttgccaccgtcggtacaaagcaaagttaatcacaacattaattggattaaacgcatgttagccgtattgccgaacccagaattacacatcgaagttggtaaatttgatatgcaaaagatgaaagatcccaccattaaaggtgaaggttatcaaaaaggtgatttgtacggctatcaaacggttaaacaatatgttttagctcgtgaccaatacaagtgtcaagtctgcaagaaaaaaggtggcaaactaaaaattcatcacattatttaccgttccttaggtggcactaatgtaccatcgaatttattaacagtctgtgcggattgtcatacagctaagaatcacgctgaaggcggcaaattatatgaattatgtaagaaggaaaagaaagtaactaagcctttgaaaggcgcaacctttatgaatattcttcgtaggagattatgggacgcctttcctaatgcccaatttaagtatggtgcgcaaaccactttacaacgggcaaacttaggcttagcgaaatcgcaccacaacgatgccattacgattagtggtatcaaacttattagcgaaaagccaacgagtgttgtgatgtttgcgcaatttcgtaagaaaaaacgttcactacacgaggcaacagctcgtaaaggacgcaaaaacaagaatatcaccagtaaacgaaatgccaaaaacactaaagaagcaaacggattttggcttaatgattatgtcagaattaagaatagtaaactcaaaggctacattagtggctttatgtccaaaggttctaatgtaaggttgcgagatagtctcaatcattatgttagcgtcacagataaaaattacacatctattaaaaatattattttaattcatcataacaacaattggaataagacagtaatcagcgagaaacaatatgttatgtgttag

SEQ ID NO: 775 - DNA, 312 bp, Lactobacillus sp.
tttaagtctgctcactttgatgaggattctggagcaatccagaatttgttgtctagactaagcagtcagcttcggctgactgggaaactacgttattttagtcatcataccttaggatgatgccctagttctaagctctatggaggctctgtaaacaatcgtaaggttaatgcgatagtcaaccttgttaacaagctaaaataacattgtcgaagggtaaccacatgtaactgttagttctctgatagttgcgtgataaggtacatgctaccttataaaaaatgaaaggagaaaatcaaaatgcaaaatcgg

SEQ ID NO: 776 - DNA, 798 bp, Unknown
  Ga0335394_10066399 JGI
atgcaacgagtattggtgctagacaagagcaaaaacccgctgatggcgtgtcattcggtgcgcgcacggcaattgctcaagcaagggaaggcggcggtctttcgtgaataccctttcaccatcatcttgaaagaacgggatggcggggatgttcaacctgtcagtatcaagatagacccgggcagtaaaaccactgggatatctatggtcgctgatttcaaagggggcaagcgcgtgatttgggctggagagttaacccatcgggggcaacaaatccgagataagttattgtcgcgccgtcaggtattgggcttgccattggaagtcgggacaggaggacgcacgaaatttaatcgggtaaaacagcactatccaaaagcgcattggattgacgcgatttgtgtaggagaaagtgggggacgagtcatcatcagtccaaatcatgcgccgcttcagattagggcgaccgggcatcaatcacgccaaatgtgccgcgttgataagtacggttttccacgaaccagcgccaaacaagggcgcgtccactttggcttccaaacgggggatatagtcaaagcaatcgttacaaaaggtgtaaaatacggcacatacattgggaaggtcagtgtgaggtctactggttttttcaatatcactacccccaccgcaacagtgcagggtatcagctatcgctactgcacaccgattcacaattccgacggctatctttaccagagaggagaggcgctttcctccgctaccacaagggtagcggtgtcctcgcgccaagattcatga

SEQ ID NO: 777 - DNA, 254 bp, Unknown
  Ga0335394_10066399 JGI
gtcaacgaccactggcacgaggccggtggcttgcgataagcaagcccatgttgaccagcctcagtctccttcgtgagacaccgttatttgggtcacgataccgacgggtgactgaaccagcccgtcgctctatcgtctaccgttaaacagccgagggtctaggcaagcgcggtgggcatgacaagcccgaataccattggcgagggtcactttactgccgcaaggcgagaaaaatgaggtaactcatgcaacga

SEQ ID NO: 778 - DNA, 2175 bp, Unknown
  Ga0115617_100462 JGI
atgccctgttcaccggcaaaagcgcggcttctgcttaaagagaagaaagctattgtgaagaggagaacgcctttcactattcagctgacgattgcaacgggtgagaccaaacagccggtgggtctgggcgttgatgccgggtacaaacatgtcggactgtccgcatcaacggacaaggctgaactttatgcatcccaagtcgaactgcgacaggacatcaccgatctgctctccgctcgtcgtgcgttacgacgggctcgcagaaaccgcaaaacgcgctaccgcgcgccaagattcaacaaccgcatccgcaccaagcgcaaaggctggcttgctccgtcggttgaaaaccgaatcaacgcgcacttgtcgcgcatagaagcggttcttcgactgcttccagtcacgaagatcaccgtggaaacggcgtccttcgacatgctgctgctgaagaatccagacattgcagggaaagagtaccaagagggcgaacaactcggcttctggaacgtccgcgagtgcgttctttttagagacgggcacgtttgtcagcattgttacggcagatcgaaagacccggtgctcaatgttcatcatctggaaagcagacgcacgggcggagattcgcccggcaacctgattacgctttgtgagacgtgccacgaagcgcttcatcgcggcgaaatcgcgctgaagacaaagcgcggacactcgttccgtgcggaagccttcatgggaatgatgcgctgggaggttttgaaccgcctaaaggcgtcgcattctgagttggaagtgaacaacacctacggctaccggactaagcacgcacggatcgtgaacggcatcgacaagtcgcattgtgcggatgctttttgcattgccggcaacctcggcgccgaaaggctatgcgaattcttcttccagaagcagacgcgtcggaacaatcggcagattcacaagctctccattctcaaaggcggcattcgaaagcgcaatcaggctccctttgagatcaaaggcttccgtctttttgacaaggttgcctgcaagggagaagaaagcttcattttcggccgtcgatcatccgggtactttgatgttcgaaagcttgatggaacccgcatttcagccggcatcagctacaagaagctgcgtctgctggaaaagagacgaacctatttaacagaaattcgaaaagaggaggcgcttcctcccccccccccccgccgggggggggcggcgcgccgcccgcgcgggagaatcaaacagagaacgcttaagaaggtattctccactgtcggtatcggtttgcactccggccgcaaagtccgtctgactctgcgtccggcacctcccgataccggtttggtgtttactcgaaccgatttgaagccgcccgttgcgattaaggctgagcctgaacgcgtcaacgacacgcgcatggcgacgacgttggataaagacggagcccgtattgcgacgatcgagcacttgatgagtgcgctgtccggtttggcgatcgacaactgctacatcgatgtcgatgcacctgagatcccgattatggacggctccggctctacgtttgtctttttgatcagagctgccggtatccaggaacaggatgctccgcgaaaattcgtccgtgtgaagaaaaacgtctccatccacgtcggcgacaagtgggcttcccttgaaccttatgacggctacaaactgtcttttgcaattgacttcggtcatccggcgattgacgaaacagctcagtttgttgaagttgacttcaacaaggaaaactatatcgaaagcgtttcccacgcccgtaccttcggctttgtgaacgacttagagatgctctggggcatgggcttggcacaaggcggaacattagacaacgcgattgtgctcgatgatttccacgtcttaaatccgggcggtctgcgctctcaggacgagtttgcaaaacacaagctcttggatgccatgggcgacttgtacgttttaggtcatccgctggtggcgcactaccgtgccttcaagtccggtcacgaaatcaacaacaaacttttgcggacgctgttagctgatcccgaaaactgggagtttgttgaataccaggatgaacacagtgctccgaaggcttttaccgaagcggtaaaagaaccttcgaactaa

SEQ ID NO: 779 - DNA, 247 bp, Unknown
  Ga0115617_100462 JGI
gtcaactacctcggcctaaaggccggggcttgaaatagcctctagttgactagcctcaggccgtcatttggcggactacgttggttgagaatatataggcaccgcgggatgtagatactagtcccgcgctctgcggccgatggttaaaagctccgagaggtaggagcggtgctgtcggtacgaaaccccttccaacattggcgaaggatcacaaccggtcgaaagaccgaggagacaaaacttgaga

SEQ ID NO: 780 - DNA, 1281 bp, Unknown
  Ga0209607_1003300 JGI
atggtatacgtaatttcaaaagatggacagccgcttatgcctacaactagacatggcaaggttcgtcgactattaaagtcaaaacaagcaaaagtaattaatcgctgtccatttacaataaaacttttatacgaaactacagatttcatgcaggaaattaatttgggagtagacactggttcgaagtatgttggttttgcagtttactcaaatgacaaaattttatatcaatcccagctagaactcagagatgatattaagtctaaaatggacgatagacgcggttatcgtagatttcgtaggcaaagaaaaacccgctatcgaaaacctagatttttaaaccgtaaacattcaactaagctaaatcgactaccaccttcaactaaatctaaagtaaatagccatatcaaagaaattaaatatataaaatcaattcttccagtgactaatttaattttagaggtagctcaatttgatactcacttgcttaaaaatcatatgctagcaaacgaaaaaatcaaacattggggctatcagaatggtaccttatatggttttgcaaatatgaaggcttatgttttaacaagagataagtacacttgtcagcactgtaaaactaaaaatggtactttgcatacgcaccatataatttatcgctcaaaaggaggttcagatgaagaaacaaacttgattaccctctgcgagtcttgtcacaaaaaattacataaaggcgagttagcaagtttcgagtctaaattagtaggtaaaagaaagcctaatttacgctacgcgactcaaatgtcgattgtgagaagtcaattgcttaaatattatgtcaacgcaattgaaacttatggctacataaccaaagaaaatcgacaaaatctaggtttgcttaaagaccattatatcgatgcttgcgttattgctagtcaaggaaataaatttaagcctaacagcgaaattttttataaaaaagttgttggtagaggcagccgtgtactagctaaatttagaaaaatatcaattcaactacgtagaggtaaaatctgtggttttagacaatatgacaaagttaagtatttaggtaaaatctattttatcaaaggacgaagatctgcaggtacttgtgctttgatggatatttttaataacccagtttattttaatcacatgcctaaaggctgtaaaataccaaagctcgctaattgcaaacgagtaagttctagaaaatctgttattattgaaaggaggataggtgcgattcctgtactaagctaa

SEQ ID NO: 781 - DNA, 325 bp, Unknown
  Ga0209607_1003300 JGI
gtaaatatgtgctcggctaaagaccgaccacctttggactaagctgaatatttactagactaagcctagagaaatcttggctacgataattaggtcatgacacctttggttgctgccctagaccattgcaactgtcgcttaacgttaaattggaaaaatatagcactaaaatccggtgcgttaagtataaaaagcctttttatcattgtcgaagggaagtcttattctttggttggtaatagattaaagataagaactacagtttggtaagtactgatttatcatttaaaacttactaattcgcgaaaggagccatttcttatgg

SEQ ID NO: 782 - DNA, 2349 bp, Soil metagenome
atggtgaaactgaaccaggaaagatcgtcataccgcagaaacagaaggaacaggaaaacatggtacagggagccaagattcgataaccgcaagaaggagaagggatggtttgcaccatcaatccggaataaacttgatacgcatatcaaggttttaaaccaagtcagtgggattctgccagtatcggaaacaatcattgaggtagcatccttcgatacacagaaaatgcagaatccggagatctatggaattgaataccagcagggtgaactgcaggggtatctcgtgaaggaataccttctggagaagttcgagagaaaatgtgtatattgccggaaaacaaacgttccgttggaaatagagcacattattcctaaatcccgccatggctcgaacagggtttctaaccttgctatttcttgtcataaatgcaaccaaaggaaaggagatatgactgcaaaggagttcggacaccccaatgtcatgaagaatgccagaaaaaatctgacacagacggcatttatgaacgctgtcaggtggaaactcaccaaactcactcagagccatcatacttttggatacatcaccaaacacgacaggatcaggctgggtcttccaaagagtcacacaaacgatgccttcgtcattgctggcggcactacgggccatgcaacacctgacaaattcggcagaatcattggtgaagcggtgaagaggtttcctgatgttgagattgaagtgcactgccacaacgatgccgggctttctgttgccaatgcaatcgccgggattgaggcaggagcccacagggttgacaccactgtgtacggcctcgaggagaggaacggaatatccgatcagctcaccattgcggaataccttaaggattacacagggaaacagcaggtggacgggaataaactgctctcagtctatgactatgtgcttgaactgatccatgagaagatgggcatggatttcttccagcacaactgtccccacaccggcaggaacgtccagacgcacaccgctggtacgcacgccgcattctctgatgtattccagggcggggacttctccgtgaacgtatacgcgggaaggagcatgatcaggaaaatactctccgccaacaatatggatgttggggaagacgaactcaggaagatcgtgctcagtataaagaatgaggcggtggagacaggcagggcactccacgttgatgacatcctgagaataggggtgaagtgcatggcaagagtgattgagctgggacacatcattgcaggcccttgtgcaggcctgatactgtctgatctggggcatgaggtcataaagatcgagaaaccgggatcaggggacatatccaggaggctgacgaagcagagtgccggtgcattccccttctacaaccggaacaagaagagcgtgtgcattgacatcaactccagggaaggtgcagaggcattccgaaggctcattggcacagcggatgttataattgacaacctgggtcccggggcggtggagagggcaggcttcccatttgagaagatttccgcaatcaatccccgtataatttacctgtcgctcaagggatacgggaaagggccttatgagaagaggaagtccctggactatcccattgaggtgcacagcggccttgcatacatgacaggcctcaagggaaagccaatgagggtagacgcatccatagttgatatgtcggcggctatgttcggcgttatcggcgttcttaacgcgctcattgaacgagaggcaacaggcaggggaaaataccttgatgtcgggatgtttgaaacctcggccgtctttatggggcagcacgtggcaaccgcacagcttaagaatgtcagcatggaaccccttaatgaaatgggcttcgcctggggaatctatgatttcttcaggacagaggatgacgttgaggtattcattgctgttacaaccgatccgcagtgtaaggcattctgcaggggcttttccatggaagtgtgcggcaatggcgactacgaaacaaacgcagcgagatttgacagtagggacacgctgattccttcaatcagggaaaagatttccgtaatggattcctccgatgttactggcattctggaggaactcaacataagctatgcactcctgaacgcaccccgggatcttctcaatgatccgcagatgaaagacaagatggtaaccgaaacatacaatggcagaaccataagggtgccacagacccctctcggttcgatacagagatcagatccgccggaacttggtgaacacacggaagaagtgattaactctctggaaaaagaatcgggacacagttga

SEQ ID NO: 783 - DNA, 296 bp, Soil metagenome
gtcggtgacgttgtcatacacagaccgaagatcgacatgcacccctcaatgaagatcaagagacaccctgaggtgtccacagaagtcagaggatacatcaggacagaggggaagggaaagaagctgcagaaggtcagttgggacttctatgaccgctgcatcggtgagttgacagttctcaggaatgagtgtgagaggatcgcccaggatttcggcaacctatcaggcttggcatcgattccggttatctgcacatcggagtatccgccgtctcggagaagagggaactctactct

SEQ ID NO: 784 - DNA, 597 bp, Unknown
  Ga0116227_10003227 JGI
atgccttgctctccgaccggggcaaggaagcttttacaagaagtgcagggcgcagttttacagctgcagccttttacaatcgtcttgaaaaaaagagaagggggggaagtacaagagataggggttaaaatagatccgggaagtaaagtatcgcgtatcgcacttgtcggaaatttttccggggaaagcgcggttgtgtggggagctaatcttgagcgtaaaggcacggcaatacgatcatcccttgccggcagaagcgttataagaagaaaccgaagaagcagaaagacacgcaccggaaaagaaggaagacttcccccctctttacaaagaagagtccacggttttgcaacgggagattcggtaaaagcggttgtcctaaaaggtaaacaaagggcaacacactccggaagagtctccatcccattatccggaagtttttccatcgatacccctaggggaaaagtagacggtatcagctgtagattttgtaaaaatctgcaacacgcagacggttatcaatattcacaacaaccaagggagcgacgcttcctcccgcgactgaagtcgcaggtttccgcgtcgtcagttgtatga

SEQ ID NO: 785 - DNA, 288 bp, Unknown
  Ga0116227_10003227 JGI
gtcaactcctcctctctaaagagagaggcttgtaagacaactaagcgtaagttgaccgggctaagttcttgtaagtaacaagagctacgttagagaagagtagataagcaccttggaatgctgctccggttccaagctctgcgtttacggttaaacggatataagggttaagtcagtgccgtaaacatacaaaaccttctcataccattgccgaggagaacattacccgggaaaagggggattgcaggtaactgctaactagtaaaaaaagagaaacgattgcaaagg

SEQ ID NO: 786 - DNA, 1443 bp, Unknown
  Ga0393264_0001341 JGI
atgcaacaaagctctcttctatttcaagagagacctgcattaagattggacataggtggcgtattcgtgctaaaccacgattacacacctatgctacctgtctctcaaaaatgcagtgagtttctcttaaaaaatggccacgcggccacctaccgtcattaccccgctgtaatcattctaaagaagcaacaagctgacaatcgttcgcctgagcgttatacggtggaactgaaaattgacccaggggcgagacacagcggtctcgcgttagttgcccatgataaagtaacgaatcaatacacagccttatggggtgccaacctcacccacaaaggcaatatcgtctctgcaagactagaatcccgtctcagtattagaagaggccgacgcaatagacagacgcgctataggccgtcccgtcaagcgaatcgtgctaatgcaagaaccgaaggtcggctaatgccttccagtcggtcaattctaggtaacatcattacctgggcaaggagactgcaaagatacacacccattcacagtattgcttacgaatgggtaaagtttgatacccagaaaatggataacccagagataagcggggtggagtatcaacgtggtgagttagagggatacgagttaagagagtatctacttgagaagtataagcggaagtgtgtatattgcgaagtggataacaagcctctgcaaattgaacacgtcataccgcggtcaaagggcggctctgatagagcctctaatttggcgatagcgtgcgaaaaatgcaatcagaaaaaaggaaacaagcccattgaggagtttctatcacacgacccagagcgtctcaaaaaggttaagggtcaactgaaaaaaggactccaaccagccgccgctgtgcaaacgataaggaacgcaacccataagctgttatgcgaatctaccggcttaccagtgtcgctatggtcaggtggccggacgaaaatgaatagagtgaaacaaggctatctcaaagaccactggatagatgccatctgcgtaggtgagactggggagcgtgtgacgatgccacctgacatgcaaccgttgcttatccgggcgatggggagaggcaaccgacattttcaagagactgacagctacggtttccctagagtaaagaaggttgcaattgatggtaaggaggtaatggttagatgcaatgccaaagaaaaaaggaagcgggtgggttcaaacggcgtgcaaaccggcgacatggttttgtttagacacaaaactgggttagagtttaaatcgcgggttatcagtattgacccaaaaagtaagtcaggcggcgtaacagccaggcatcctaccactggcaagaaaataagtgcccgtgccgccgcctgcaagattttacagaagacggacgggtatggttataataccaaggaaactgaagaggcgtaa

SEQ ID NO: 787 - DNA, 290 bp, Unknown
  Ga0393264_0001341 JGI
gtcgtgaaccctccatttcatgcggttcttgagttttgtggttcaggttcaggactcttataaacacagcgaaaccagtctcagccagaaaaaacgctggctacgttattcgtgaaaatatagtaaccgtcggatgcttctccagtcctacgctcttagagatacttttaaacagctacgtgttataaatttggtagtggcagtgaagtatctataaaaaaccacgattaacattgacgaggagaccattgctgctatgcaaatagcaaacgaaaaataacatgcaacaa

SEQ ID NO: 788 - DNA, 504 bp, Unknown
  Ga0127503_10276577 JGI
atgggcaagcaagggagtggtgcagcggacgcatcagagccggccagtgcttcggctgctgcggaccgagagcgagcatcaaacaggttgacggggtgtgcccgcctgctcatgaagcagggcaaggcggcggtctaccggcgctacccgttcacgctgatcctcaaggggcagccggaacgattggcgcgtcttctggctcatctcaaagcgccgctaagagatgcggcagcggtcaacacgacgcgctgggccatgtatgaacggctcaccgccctgggctcgccggtggagggtggaagtggagggttgacgaaatacaaccgggtgaggcggggaacctatgtcggcaaagtggccgtgcgcagccgtggcatcttcaacatcaccacggcacaaagtgtcgttaccgacattcatcatcgctggtgtcggctcgtggcaagagccgacggccatacctatcagcaaagaaaggaggcggcgtttcctccctccgaatga

SEQ ID NO: 789 - DNA, 275 bp, Unknown
  Ga0127503_10276577 JGI
gcctgggcacacacgatcctgcttgatccgtgtgcccgggcttttgtctcaggtgtaatcaccgcttgcaagaaatgagagcaaacgctatccagtgcaagcaagtactccatgaccgctttctgatcgctctgagagaataatctctcaaactatccggactttggtgaagactgctgatctgctcagtgctcatgagttgatactgtaggatatcaatgggcaagcaagggagtggtgcagcggacgcatcagagccggccagtgcttcggct

SEQ ID NO: 790 - DNA, 1461 bp, Unknown
  Ga0075519_1000010 JGI
atgcagaagttagaagaaagaaatacatacacacctacggacattccgcacattcgtagcaactgtggtttgccattaaacagagaggaaactctcagtgtgtcagacttaaaaacattttctaacaactccgatgcggctctaattgcgacaggacacgcaaagcagaacacgagtgtatctgctgtatttgttctaaacatgagaggccaaccactcatgcctacaacaccaagaaaagcaaaacagttattaaaggaggataaagcgaaagtaatcaggagaacaccattcacgattcaactaaaatatgcaacaggagaaacaaaacaaccaataattcttggagtggatagcggattcttgaatgtgggattatctgccacaacagacaggaaagaagtatattccgcagagataaaacttcgctcagatatggtaaaactcaattcagaaagaaagcagtatcgcagagcaagacgcagcagaaaaacatggtacagacctccaagattccttaaccgaaaaaagccagatggatggcttgctccctcaatccaacataaacttgaaagccatatcaagttaattgacagcataaaaagattgcttccaattactaaaatcgttattgaagtagctgcatttgatatccagaaaatcaagaatcctgaaatatctggaactggatatcagaatggtgtgcagaaagatagctggaatgtcagggaatatgtgtttcatcgggacgatcatacctgtcaggcatgtaaagggaaatcaaaatacccgatacttgaaacacatcatatcatttcaagacaaattggcggggatgctcctgataatctcttgaccctgtgccagtcctgtcataagaaagtctcaaaaggcaaactcaaactggatataagattacccacaggtttcaaaccagaaacttttatgtcgataataagatggaaaatggtcaatatgttaagggatgcaggaaatattgtatatcacacttatggatatatcacaaaatttgatagaattgcattaggtcttgataaatctcataataccgatgcttttgtaatcgcaggtggaactatgcaagaaagaagttcagtaagccatttaatcaaacaagtcaggaaatgcaatcgtaaattattcaaaggcgaaagaagccatatcaagaacacagctgcccgattcattcacggattccaaagattcgataaagttctatggaataatattgaatgtttcgtattcggaagaagaaaaacaggttatttcgagttgagaaaacttgatggtacaaaaatccatgcttcagcaaaggcaaaagaacttactttagtacaaagttctaatacatttttaatagcgaatttgaggcggggtacgctcccccacactctgaagagtgtggtttccgctacccctgcaccccatggagttttatga

SEQ ID NO: 791 - DNA, 227 bp, Unknown
  Ga0075519_1000010 JGI
gtcaatcacccacacctgaaaggtgtgggcatgttccgtgaggaggatgggcaacaggttgacaaggaggcataaattatgcagaagttagaagaaagaaatacatacacacctacggacattccgcacattcgtagcaactgtggtttgccattaaacagagaggaaactctcagtgtgtcagacttaaaaacattttctaacaactccgatgcggctctaattgc

SEQ ID NO: 792 - DNA, 1554 bp, Unknown
  Ga0063356_100000074 JGI
gtgcctcctcagccccgggctcttcgagcgcgtcgtgcagacaagcctgggaacgcacgaaacgacggcgcgcatacggctgctgcccaacattcccgagaggagcgtacagccccgccagggctgataccgtcacctgagcaatcagtgagcggggtaacccgcctaacacaaagcaccatgcagaccaaacaaacccaatcccgcgtcttcgtcctcgacaggcatcagaagcctctgatgccctgtcatccggcacgggcccgcgaactgctcgacaaaggcagggcccgcgtccaccgtctcaacccctacaccatccgcctggttgatcgaaccctggagaactcatccctccagccggtccgcctcaagttcgatcccggcgccaccaccagcggcgtcgccatcgtccgggaggacgaggaggcccagcacgtcctccacctcgccgagatcgagcatcgcggcaaggctgtccgcaaacacatgatccagcggggcaactaccgcggtcgccggcgttcggcaaacctgcgctaccgccagccccggttcgacaaccgcacccgtctcgccggctggctgccgccctcactgaactcccgctgcgacaacctgatctcctggacaaaccactaccgccggctggttcctgtcactgccatcacggtcgaaagcgttcgcttcgatatgcagttgcttgagaacccgaacatctcgggcatcgagtaccagcagggcacgctggccggctacgaggttcgtgaatacctgctggagaaatggggccgccgctgcgcctattgcgacaaggaacacctgcctctccagatcgaacacatccaggctcgggcaaagaacggctccaaccgcatctccaacctgtgcctcgcctgcgaaaagtgcaaccggcgcaaaggctcgaaggacgtccgggacttcctgaaacgcgatcccgaacggctcaagcgcatcctcgctaccgcgaagaagccgctcgccgccgcagcagccgtcaacgccacccgcaacagcctggtccgccaactccgattaaccggactaccggtcgagacatccagcggcggccgcaccaagtggaaccggtcccgcctcggcgtaccgaagacccacgccctcgatgccgcttgcaccgggaccgtcgacaccctgctgaactggcagatgcaaacgctcgccatcaaggccaccggccgcggctcctaccagcgaacccgcgtcaacaaacacggcttcccccgtggctatctgcctcgaactaaaaccgttcacggcgtccgcaccggcgacctgatccgagctactgtcccaaccggcaaaaaagccggctcctacaccggtcgcgccgccgtccgttcctcaggcaacttcaacatccaaatgccccacaccaccgtcgaaggcatcgcccaccgcttctgcaaggtgcttgcacgcagtgacggctatacctactcccctcaatccctggacttgacgcccgtgctcctcccggccgttaacggccgggtttccgcacggagtttttga

SEQ ID NO: 793 - DNA, 240 bp, Unknown
  Ga0063356_100000074 JGI
gtcaataacccggccttaaaaggccaggcttgaagtccgaaaggagttcaagcctacgttgaccagggaaagtcacagagaagggcatcgttgatgtgactacgttgagcagtaagccaaagacggaccccggggtgcctcctcagccccgggctcttcgagcgcgtcgtgcagacaagcctgggaacgcacgaaacgacggcgcgcatacggctgctgcccaacattcccgagaggagc

SEQ ID NO: 794 - DNA, 1371 bp, Soda lake metagenome
atgtcggttttcgtactcgacaagcagaaacggcccttgatgccgtgcagcgagaagcgcgcacggctgctgcttcagcgaggccgagcggtggtgcataagcgctatccattcacgatccgtctcaaggatcgggtgggtggcgaaacgcaacctctgcgcctgagcctcgatcccggcagcaagaccacggggctggcgctgctacgcgaaacgggcgacgaccagcgccatgtgctgtgcctgttcgagctggtgcatcgtggctttcagattcgcaaggcgctggagcaacgcctggcgtttcgccgtcgtcggcgctcgaccaaccttcgctatcgggcgccgcgcttcgataaccgtactcgccgggacggctggctaccgcccagcctgcaacaccgtgtcgacacggtgatggcgtgggtggataggctctgccgcctggccccgatcagcgccatcagccaggagctggtgcgcttcgacctgcagaagctggaaaaaccggagatcagcggcgtcgagtatcagcagggcaccctgctcggctacgaagtgcgcgaatacctgctggaaaaatggggccgggagtgtgcctactgcggcaccaccgacacgccgctggaaatcgagcatgtggtgccacgctcaagcggcggctcgaatcgcatcaccaatctgacgctggcctgccacgtctgcaaccaggccaaaggcaacggcacactggatgccttcttcgccaccgacaaggggctgaagaagcggctcaaggccaatggcctgtcagcggatacccggctggatcgcgtgcagcgtgaactcaagcggccgctgcgtgatgccacggccgtcaatgcgacccgctgggcgctgtatcaagcgctcaaggccactggcctgccggtcaacaccggaagcggcggactcaccaattacaaccgccagcgcctgtgcctccccaagacccatgccctggatgccgcgtgtgtcggtccattcgaccggcttcatggagagaaccgccccacgctgaccatcaaggccatggggcgcggcagctatcagcgcactcggctcaaccaatatggcttcccgcgtggctacctgatgcggcagaagcaggtaaagggcttccagaccggcgacatggtgcgagccatcgtgcccaccggaaagaaggccggcacgcatacgggccgcgtcgccatccgcaagaccggcagcttcaacatccagacccccgaaggggccgtgcagggtatctcctaccgtcactgcatcctgattcaacgcggtgatggttacggctatcaccagacaccatccacccacgcaaaaggaggagcgggacaggctgtggcatag

SEQ ID NO: 795 - DNA, 307 bp, Soda lake metagenome
gtcaactacccccgcctgaaggcgggagcttgtaaaagcaagctgggttgaccagggaaagcggtaatcaatccactacgttagtcacaggtcgttaagacccaccgccgaatgcttcctcagttcggcgctctggaaggtcaggatcatgctgcggtacgccgcccgggcgaaaggtaaagcgccgaaggttctgatcgctgcggcaacgcaggagccggtggctgacattcccgaggggagatgggccgaaaggcccacgacacaggacccgtaaggggagtgattaggagaaaatcgcatgtcg

SEQ ID NO: 796 - DNA, 1140 bp, Lactobacillus delbrueckii
  MISC_FEATURE (774)..(1123): Any "n" represents any nucleotide
atgaagcacgaaaatgccaatcgggtgtttctgcttaacaaggacggcaagccgctaatgccatgttgtccaagaaaggccaggctgcttctgaaaagcggcaaggcttttgtggtcaagaaatatccgttcaccattcagctgaaatacggctcatacggctataagcagaaggttagccttggcgtagacactgggcagagacacattggctttgccattgtcagtcaaaacaaggtgctgcatcaaagcgaggtagagcttcgccaagacgtacacaaaaatctgtacacccgcaagatctaccgcagaagcaaaagaaaccgcaagactcgctatcgccaagcccgctttttaaacagagtgcatggcaagcgagacggcttatggcttccgccatcagtaaaaagcaaggtaagccataacattgcttggatcaagcgctatctggctgtattgccaaatcccgatctccatatcgaagtaggcaagtttgacatggccaagatggtcaatccagacatttcgggcaagcagtatcaagaaggcagtctaaaggactggaagaactatgagtactacgtgctggcacgtgacgagtacacctgtcagctttgccataagcatggcgaaggcgtaaagcttgtcgttcaccacatcgtctaccgctcacaaggcgggacagaccgagtggacaatctgataacgctttgcacgaattgtcatactacgaagaaccaccagccaggcggcaagctctacaagtggatgaannnnnnnnnnnnnnnnnnnnnnnnnnnnnnnnnnnnnnnnnnnnnnnnnnnnnnnnnnnnnnnnnnnnnnnnnnnnnnnnnnnnnnnnnnnnnnnnnnnnnnnnnnnnnnnnnnnnnnnnnnnnnnnnnnnnnnnnnnnnnnnnnnnnnnnnnnnnnnnnnnnnnnnnnnnnnnnnnnnnnnnnnnnnnnnnnnnnnnnnnnnnnnnnnnnnnnnnnnnnnnnnnnnnnnnnnnnnnnnnnnnnnnnnnnnnnnnnnnnnnnnnnnnnnnnnnnnnnnnnnnnnnnnnnnnnnnnnnnnnnnnnnnnnnnnnnnnnnnnnnnnnnnnnnnnnnnnnnnnnnnnnnnnnnntgactacgttcgtgtga

SEQ ID NO: 797 - DNA, 337 bp, Lactobacillus delbrueckii
ttcgggtctcttatctttagcagggaagctggagaaatccagctttcattgtctagactaagctatccaatcggcttcagctgactggatagagggactacgttatccatgtcatcacacccaaggatgatgcccaagtctttggctctgtggcagctctgtaaacagtcatgaggttaacgtgacagtcaactgcgttggcaagcatggataacattgtcgatgggcaacaacgcaaatccggattgggtctcctgattcggacaagtggcaggaatcactgtttcctgcattacggaaaaggagaaaaagcatgaagcacgaaaatgccaatcgg

SEQ ID NO: 798 - DNA, 273 bp, Unknown
  Ga0197810_1087  JGI
atgcaacgagtgtttgtggtagacaaaaatcgagagccactgatgccctgccaccgggcacggaagctgctcaacatcgtgcgggcggttgtaaccagcggcaagaagattagcgcatataccgcgcgggtggcggtgcgaagctcaggcagcttcaacatcaccacgcgcaaaaaaacggtacagggtatcagctaccgctgctgcaccccgctgcacaaatccgatggttatagctacgagaaaggagaagcggcttccttcaccttttga

SEQ ID NO: 799 - DNA, 252 bp, Unknown
  Ga0197810_1087 JGI
gtcaacgaccacccgatttatcgggtggcttgtaaaagcccatgtcgaccagcctcagccctatggggctgcgttacgggcgaatgcataggcactccggggtgacgccaccagccccggtccctgcggtcagtggttaaatcgtctgagggtctgagccagtgctgctgacaccaaaccgcccgataacattggcgaggtggacttcaccgccatctggcgagaatagaggggtaactctcaatgcaacga

SEQ ID NO: 800 - DNA, 702 bp, Unknown
  Ga0116167_1020986 JGI
atgcatccgttcactatacgtctaaaagacagaacagtacagcaaagcgagttacaacctttaagattaaaactcgaccaaggagcgaaggttactggtctttcagttttgcgagaagacggcgatgtagcagaaacagtttttctttgcgagatacaccacaaaacagacataaagcaaaaacttgatgccaggcgtgctgttcgtcgaagtagaagaaacagaaagactagatatcgaaagccgaggtttctaaatcgaagacggcctgaagggtggctgccaccatcgttcaaagcaagagctgaccagcttataaatgcggtaaggaaactgacaaagctgttgccaataattgcaatatccatcgaagatgcaaagtttgatactcaaaagttgcaaaatccagagatttctggcatcgagtatcaacgaggcacactttttggctacgaggtaagggaatatcttttggaaaagtggggacgaagatgtgcatactgtggtagaagcgatgtaccactggaaatcgaccacatcgtaccaaggtcaagaggtggcacagatagagtatcaaacctaacacttgcttgccacgagtgtaaccaaaagaagagcaacaaaacagctgctgagtttggatacccacatattgaagagcgggcaagacaaacatacaagcaagcagcattcatgaactcg

SEQ ID NO: 801 - DNA, 298 bp, Unknown
  Ga0116167_1020986 JGI
gtcaactacccccgactgaagtcgagggcttgtaaaagccctggttgaccagcctaagcaccggacccaaaggacaaggggacgaaggtgctacgttggtagtgggctcaagacccactccgggatgcttctccagtcccggacactggaagtgctggttgcagacaacctttggggtgtgggcgaaacggaccagcacacgtgccggctaccaacattggcgaggagagtgctaaagtgagtccgctttagcgcgtcacaaggcccgtaagggcattttcaaggagtgagacacatg

SEQ ID NO: 802 - DNA, 1254 bp, Unknown
  Ga0123348_10016055 JGI
atggtatatatactaaacaaagatggtcatcccttgatgcctaccgaacgtcacggcaaggttcgtcgtatgctgcgtgatggtttagcacatgtggttcgacttgttccatttaccatacaattagattactcgtctggcaaggaagtacaagaggtgtcgttagggatagatgctggcagtaaacacattggggtgtctgcaacaacggagcgacgtgaactattagcaatgcaagtggaagagcgtgatgatatcgtgaaactaattgccgacagaagagaggcaaggcgaactcgaaggaatcgtaaaacacgttatcgtgcagcacggttcgataatcgtcgtagaatggatggatggtttgcgcccagtattgaaaatcgcatctctgcacatttgcgtctaattcgacttgtgtgttcaattttgcctgttactcaaaaaacgattgaggttgcacaattcgactcacagaaaatcaagaatgacaagatttcaggagttgaataccaacaaggagagcaacttggtttctggaatgtaagagaatatgttcttgcaagagacggacacagatgccagcactgcaaaggaaaatctaaagacaaaattttgaatgttcatcatctggaaagcagaaagactggaggcaatgcgccaaacaatctcattacgctgtgtgaaacctgtcataaggcataccatcgcggtgaaatccaattaaaagcaaaacgtggaacaagtctgcgcgatgccgcagtgatgtccataatgcgttgggagatttataaccgtgctcaacgtgagtttacgaatgtgaatttgacgtatggttatattacaaaacacagccgtatcaataatactattgccaagacacattgtgctgacgctttttgtatttcaggaaacgtccaagctgaacgcctaccatggttctatggagttcggctgcaacgtcggcacaatagatctcttcatatattaaagcctacgaaaggtggtgttagaagaagtaatttggcggctcattggattggaaaatcgcaattgcaacaatatgactatgttgaatggaatggatataaggcatttatctctggcagtcaaaatggaagaccataccttaaaaactttgacgataagtatatcatgacacccaaagcatccgtcaatgcaaagacagtgaaattcattcgaagaaagcgtggaagtatgataattgaacaattacctaaaaatattgtatag

SEQ ID NO: 803 - DNA, 283 bp, Unknown
  Ga0123348_10016055 JGI
gtttacccacaaaaatgctggtactaacagcagattatgtgtaagccgattagcctcaggcatataaagggcatacgtgttatgcaaattatatgacctacgttaggagtgaatgtataggcaccttggaatggtcgcccaagttccaagctctgcggtcagcgattaaaaggagcgaaagcaacggtgtcgctgatatatgaaaccactctataacattggcgatgggcgcataacgggcgcaagcccgacttatagtttttaaatagaaaatctaaatatg

SEQ ID NO: 804 - DNA, 1269 bp, Unknown
  Ga0257072_1000039 JGI
atgttcgtgtacatcattaacaaaaacggacagccgctaatgccctgcaagcctcaaaaagcaagaaagctcctgaaggctggcaaggcggaggttgtcaaatatgagccattcactatcaagctgaaatttggctcagctggctacaaacagccgataactttaggtattgacgccggctccaaacatattggggcttccgtgtcaacagaaaaacaggaattatatgcttcggaaacagtcatgcgttctgatgatggcaaggctactatcgtgaatcttatagcaaaacgcagagagcttcgacgtaaccgcagaaaccgtaagacccgttatcgcgaagcaagattcttaaaccatgttcatcgcaagcacaaaggctggcttgctccaagcgtagagaacaaaatccatgtccacctaaagctggtggcggatatccacaagatactgcccatcactaaagtagtggtggaagttgcccagttcgacattcagaagattaagaatcctgatatttccggtgtcgaatatcaacaaggtgaacaacttggttgggctaacgtcagggaatatgtattattccgcgacaatcacgaatgtcagtgttgcaaaggcagatctggagatccgatactgaatgtgcatcacattgagtcgcgaaaaactggcggcaacgcaccaaacaatctgataactctctgcgaacattgccatcagagctatcaccaaggcaaaatttctttacctaagtcgatacatcgcggcatgagtttccgagatgcagctttcatgggcatcatgcgatgggcattctacaatagaattaaggcgttatatcaagacgtcaaactaacttatggttacatcacgaaaaatactcgcatcaagaataacattgccaagacacatacagctgacgcttactgtatcgccgggaacgtcaaagctagacggcttaaacatgagtatttacgtaagcaagttcgcaggcataatcgcaaactacatcgagaagtgccagctaaaggtggtattcgtcgattggctcaagcagggcatttcgtaagaggcttttgcttgaacgatactgtgatggccaaaaatcagcagtggtttattcgaggcatgcgtcaaaagggcagttttgttctaagacatcttgatggcacaaaactggaaattgcgctttcaaaaataacatttttgagacataacaattcttatttaatcgagaggagagaagtggcgcttacctccaccctgtag

SEQ ID NO: 805 - DNA, 288 bp, Unknown
  Ga0257072_1000039 JGI
gtcaataacccccgcctagcggctttgcgcttgaggcgggagcttgcggaagcaagctctgattgactagcctaagtcttaactgactacgttgctttcgttatctcacccgtgggtgtttatcctagcttacggctctgagcaggctctgtaaaagttctgagaggtaggaacggtcaacctgaggacggtctggcgttaatccagacaagcgattacaacattggcgaagggtagattactctaatttgaagcttttgcttcggaaaggaggtacacgttatgttc

SEQ ID NO: 806 - DNA, 981 bp, Unknown
  Ga0075017_100018482 JGI
atggtaccagtatttgataaagaaaaagttccattaatgccttgttctgaaaaaagagcaagacttcttatggaaagaggcaaggcgaaaccgtattggcaacatggcttcttttgtattaggcttactgtggagccttcggctcgtcattatcaggatgtcgctcttggaattgatcctggatcaaaacgggagggatatactgtactgactgagacgcaagtggtaatcaatattactacagatactccggatcaagtaaaaggtaaggttgaaaccaggagaaatcttagacgaagtcgtcgtcaaagaaaaactccttatcgaaaatgtagagcaaatagatcttcattgaaaaacaaaggcgttccaccatctacaaaagcaagatgggataagaagctgacaatgattcgttatctcacagacatgcttcctattacaaagataaatgtagaggatgtggcagctaaaaccaaacatggaaaaggaagatggaatagatctttttctcctttggaagttggcaaagcatatttttatgaaaatgttgctaaaacttatccagatatttctttgagtaagaccaaaggttttgaaacaaaagctcatcgagatattagggaatttgagaaatctaagaaaaagttagagtggacatgggaagctcataatgtagattctcattctctagcggagatggtacttaataaacaagttaaaccatatcgtggacttttaagattgaagtggatgaatttttcaagaaggcaacttcacgtccaagttcctattaaaggaggtattagaaagccttatggcaaatctattacacaaggaataccaaaaggaatgatttgtaagtatattggcgaaagcaagtcgtgtaatagtaatgatttgtattatcttggtggagaatctaaaggaaaagtgacactttgtaattataattggggaaaacgcgcatcccgatcaatc

SEQ ID NO: 807 - DNA, 248 bp, Unknown
  Ga0075017_100018482 JGI
ttcagctaccataatctagataagtagattatgtattgctcacatagaagtaatagttctaaccaaacgttatgatgtgacgaaagtgaattgattagacaggcgataactgaaaagttatcgcaaaaacatatagtagaatcaaacccgttattggttagggttaaagtatgtagagaatgtttcgctagttctcttcctctacgattctagtatgtcgaagcgagattaacaagtcccgtgaggga

SEQ ID NO: 808 - DNA, 1242 bp, Unknown
  ERB_1001085 JGI
atggtctttgtcttggacaagaaaaaacgaccgctgatgccttgttctgaaaaacgagcaagattattgcttgaacgcggcagagcgagagtacacaaaatgtacccgttcaccatccgcttggtagatcggttgcaagaggattccgtattgcaagaagaacggctcaaacttgatcccggttctaaaacaacaggtgtggctgtcacgttggatggagcaacaggcacaaaggcagttttccttggcgaagtcattcacaagccaggaatcaaagcaaaactagacagtcgacgcgagcttcggagatcaaggcgcaatcggaaaacccgctatcgcaagccgcgtttcctcaaccgcaaacgcaaagaaggatggttgcctccaagcctagaagccagagtcaatcaaacgatgaatgccgttgctaaactgattagattcataccaatcaccgccgttagtgtagaacacgtcaaatttgatacacagttgatgcaaaacgcagagatttcgggtgttgagtatcagcagggcgaacttgcaggctacgaggttcgcgagtatctcttagagaagtgggggcacgcttgtgtgtattgcggagcgactgatgtgccacttgaggtcgaacacattgtcccgaaatctcgtggtggaagcaatcgggtatccaacctaacacttgcttgccacgagtgcaatcaggagaaaggcaatcgaacagcagaagaatttggccacccaaatatccaagcgcaggcgaaaaaaccactcaaggatgcagcaacaatgacccttcatcggcgagagacgagcgatgacgagctagatcacgtgagcgagatcaggcgcgaaactcgttccaaaggcccagccaaagggaattgcgcttcaacgacgcacctcttccgccgatctcataactcgcgttgcgcctctccgtgtggcctgatgggccgttggagcgtgcgatcacgcgcttcttcaggcgcggtcttgcacgacgttaagaccagcacgccgcgcgcagtgagcgcagcaaaagtaggcttcgccgacttccactccatgcccgatgatccggcacccacagtgagcgcaagtcggggcgagagcctgaatggcacattcgaagctatcgaacgtgtgagtgcgcccttgcatgatgacctgaaaagctttgtcgtagtcgttgccacagagttcacactgcgccatggtcacctccttttcgtctag

SEQ ID NO: 809 - DNA, 332 bp, Unknown
  ERB_1001085 JGI
gtcatagaccccacggcgcgcagccggggggcttggaggtgccagaaggtacctgagagtcgcttgcgtagctgaacatctatgaccagcctgagtgccggagcccgaaggacaagggcggcgaaagcactacgttccgtgggtcatggcaccccggggtacttctccagccccaggccctgccgcctgcggttaaacgcaagctgggggtgtagcgagccgtgccgcaggcgcggaaagcccttggaacatgggcgaggagagacgcgggcggagtccggtccgcgcgtcaccaggcccgtaagggttatccaaaaggagcggaaacgatg

SEQ ID NO: 810 - DNA, 1257 bp, Human gut metagenome
atggtttacgtaattaacaaacaaggacaggcacttatgccaactgaaaggtttggtaaagtgagaaggctattaaagaatggtcttgcccatgttatgtaccgtattccattcacaattcaattggattatgacacaactaacttcattcagcccataagtttgggtatagatgctggtagcaagcatatcggcatatcggcaacgacaagtgagaaggaattgtatgcagcagatgtagaacttagaaatgatattgtagagaaactatctactcgtagagaacaaagaagaactcgtagaaatagattgcgttatcgtagggctcgtttcaataatagggtttcatctaaaagaaaaggttggttagcaccatctattgaaaacaaaatccagactcacttaactgttgtagagaagatacataagtttctgccaataactaatattatagtagaaactgctgcttttgatatacaaaagattaagaatccaagtatatcaggtaaagaatatcaacaaggagaacaactcaacttctttaatgtgcgtgagtatgtgcttcatcgtgatggtcatcagtgtcaacattgcaaaggtaagagtaaagaccctatcttgaatgtgcatcatattgagtcgagaaaggttggtggaaattcaagtcaaaacctcataacactttgcgaatcttgtcataaagcataccataaaggtgaaatagaactcgaagttaagcgtggcacatcattcagggattctgcatttatgtctacaatgcgatggagcttctacaagaagttgaagaatatctatcctaatgtaagtatgacttttgggtatatcacaaagcacactcgtatcactaatgggctatcaaaaagccactatgttgatgcaaggtgtataagtggtaatcctaccgctaaacctcttgaatattatttctatcaaaagaaagtgcgttgtcaaaacagacaaatacacaaggctaatttcttgaaaggtgggaggaagaaactcaatcaagcaccatacttggtaaaagggtataggttatttgacttagttgaataccaaaaggatttgtattacatatttggaagaagaggtagtggtttctttgatattaggaaacttgacggtacaaaagtaaacaagggttctcttagttgtaagcagatgcgattgatagatataagaaaaacaataataattgaaaagcgaatgcaaggcgcaatttctcccataaactaa

SEQ ID NO: 811 - DNA, 273 bp, Human gut metagenome
aaccagaataatattgtcaactacccacaggctaaagacctgtgggcttgaaaaagcccaagttgattagtctaagcacttcgggtgctacgttaggagagaatatatagttaccaagtgggtgtttgctcaagccccctgctctaaggttagtgattaaacaattccgtgaggtagggatagtgttgctaacgaaaacctctccataacattgacgatgagcatttaacggagaaatccgacttatagtaaaatttttaaaaaaaaagaatg

SEQ ID NO: 812 - DNA, 1332 bp, Unknown
  Ga0074432_100015 JGI
atgtcagtatttgtcctagataagcgcaagaaacctctgatgccttgtactgagaaacgggcaaggcttctactagaacggaagaaagcggtcattcaccgaacggttccgttcacgattcgcctcaaagaacgcgtaggcggagaagttcaacccgtcgcagtgaagcttgacccggggtcaaaggtcactggaatcgccctcacccgtgaagtgggtaccgaaacgacccaccctatgttcctcgccgaattgcatcaccgaggggcatccatcaagaagtcactcgagcaacgctctggttatagacgtcgacgaaggtcggcaaaccttcgctaccgagcccacagattttccaacagaacgaagcctaagggttggttggcccccagtctcctacatagggtagagacgaccttgtcttgggtcaataggttccgacgactggttccggtcagtcgaatctcgatggagttggttcgattcgacctacagaagcatctcaatccagaaatctctggtattgagtaccaacaaggggagcttcaggggtacgaagtacgggagtatttgttggagaagtggggtcggaagtgtgcttactgtggggttgaaggggttccacttcaagttgagcacattgtaccgaaggcttcgggtggctcaaatcgtgtctcgaacctgacgttatcgtgtcacacatgtaaccagaagaagggttcgaggtctgtcaagacatttcttgcgaagaagccggaggtgctcaagagggttcttgttggtgcgaaggcgccattgcgggacgcagcggcggtgaactcgacaaggtgtgttctatacgatacactcaaggctacagagctacctgtcgaaacggctagtggaggtcaaacgaagtggaatagaagccgatttagtataccgaagactcacgcactcgacgctttatgtgtgggtatattaaaaggcatcaaaaactggttacaaccaacgcttgctatctattctacaggtcggggagtctaccagaggacgagggttacgttatgtgggttcccacgtgggtacctaatgcgaaagaagtcggcgttcggatttcaaactggcgacttggttcaggcagttgtactgaaaggtaagaacgtgggaacccacacgggacgtgtagcgattcgggtgactggaagttttaatatccaaacaagtcacgggttaatacaaggtatttcatatcgttactgccggatggtccagcgtggcgatgggtacaggtacgagattgggctcttcccaactttcaaggacggggtttttgccccgaagaaccaatga

SEQ ID NO: 813 - DNA, 277 bp, Unknown
  Ga0074432_100015 JGI
gtaaacaactcctcctttatgggaggtgctttgtgcgggagacatcacaaagcacctgtttaccagggatagcgaaagctacgttgtgattagggatccagaccgacgtccgaatgcttcctcagttcagacctctcgaagacatctttgcagacaagccagagttaggcacgaaacggaagatgtcccaacaccggatcacaacattcccgaggggagacggctcgtaagggccgcgttactaggcccgtaagggctccgcaaggaagatatgtca

SEQ ID NO: 814 - DNA, 1386 bp, Chloroflexi sp.
atgcaacacgtgttggttctcgatgcccagcggcgtccgttgatgccgtgtcgccccgcacgagcgcgattgctcttaacacaaggcaaagcagctgtgctgcgacgctctcccttcctcatcattttgaaggagtccaaaccagacgctggcgtgaagcccatgcgcctcaagattgatcccggtagtcagacgacgggcttggccctcgtcaccgctgcgacggacacctctgagcaggtgcacggtatggtgctgtgggcagcagaattgacccatcggggcagtgaaatccatcgggacgtgaccagccgtggcaaggtccgccgttcccgcaggtttcgccatacctggtatcgcgaggcgcggtaccacaaccggacccgtcccgcggggtggcttccgccctcactggaaagccgtgtgcacaacgtcgccacctgggtccagcgtctggcgcggtggtgtcccatcggagccatctcgtttgaggcggtacggtttgatacgcagttactccaacacccggatattgctggcatggagtaccaacggggggacctcgcagggatcgaggtgcgggagtatctcttgctgaaatgggggtatcgctgcgcctattgccaccagcaggcgacttctaccaattggtgggaaattgaccacatcatgccacgcagtcggggaggaagtgatcgggtctctaatctcgccctcgcatgtcacaaatgtaatagtacaaaaggagaccagactgctcttgagtttgggcacccggaggtccaggcgcaggcgagagcacccttgatggatgccgccgctgtcaacagcactcgacgagcggtgcatcaacgcctcctagcgtttggcatgcccgtggagaccaacagtggcggtctgacgaaatggaataggacacagcatagcctacccaagacccattggcttgatgcttgctgcgtcggccggagtactcctacgtttctgcggggctggcaggaccttgtcccgctcttgatcacggcacagcgctggcagcggcggcagatgtgcttaatgaacgagcatggcttcccgcgtacgagggccaagggagccagccgagtgcagggattcaagaccggcgatatggtcaaggcggtggtgccgagtggaaaacccgaggggatccatgttggcaaagtggcagtcaaagcgcgcggctacttcactgtggctagtgtgcccgatgtgccctctcgctattgccggctccttcagcatgccgatggctatgagtatacccagggagtacccgctgggagatcttcccagtcagcaccgggtcaggcggcgggtagcggagggagcgttgtccgcgaagagaccagagtgtcacgggactga

SEQ ID NO: 815 - DNA, 320 bp, Chloroflexi sp.
gtcagatacccggtccccagaagagggcgggcttgtgcgagcaagccatctgaccagttcccttcctctgcggagggaggagccgttgacgaggagcgttcagagtcgcaccctgggatgaccgatccagtcccaggcaactgcaagcgcacggttaaacagcggttgggtgccgcagtgccgtgcgcagagtaccgctcgtcaaccaggacgaggatcaccttacctgcgcgtcttccgagccatcgccaggcaagcagcgtcgccgtgtatggcgtccctttagccagggaagaaagttctgatgtgttatgcaacac

SEQ ID NO: 816 - DNA, 723 bp, Unknown
  Ga0123338_10037050 JGI
atgaaagaaaaccagagatatgcttttgtactagataataggggtattaagttatccacaacaaaagaagaaaaagcatggtataagataagaaaaggtaacgcaaaattaatacaactaaaacctatgataattcaattaaattataaggtagacaatacagacaatagtaacatttacgtaggattagatgtaggtgaaacaactggtgtaggtatagttcaaaaatgcaaaacaagaaataaagtaatatttaaaggtgaaataaagcatagaaaagatgtaagtaagttaatggagcaaagaaaaaattatagaaaattaagaagggcagaaaaaagatataggcaagccagatttgataatagaggtagtagtaaaaaagaaggtagattaccaccttcaataaaaacaagacaagatgaaataataagatttataaataaattattaaaattactagatataaataaagtaatagtagaagatgtttcatttgatatacatgtattaacaagtggttataaaccatataaatgggaatatcaaaacacttataggttagatgaaaatacaagaaaagcagtattaatgagagataagtttacgtgtcaaatgtgtggtgcagtagagacaagattagaagcacatcatataacaccaaaaagacaaaacggtgaaaatacattggataacttaataactttatgtagcaactgtcat

SEQ ID NO: 817 - DNA, 292 bp, Unknown
  Ga0123338_10037050 JGI
tataaaaagttataagtaattgttagtggtttcaagtcagagtgagtgcagctacaggaaactgagacgcacaatgaactacgttagtgaaagaagttaaacacttacctttggatgtatccatcagtctgaagctctaagagtttttgaggaagaaagtaaacctaagtagccttgatacagaggttatatgaaaacctaaccccaatttaacatgaacttatcgttgacattgacaagaaggaaaatacttttaggaaggttggagaaatcctatgaaagaaaaccagag

SEQ ID NO: 818 - DNA, 798 bp, Unknown
  Ga0187784_10040265 JGI
atggcctttgtgcttgaccggaaacaacgaccgctaatgccgtgcacagagaaacgggcacggctgctcctcgaacggggccgggcgcgcgtgcaccgcttgtatccgttcacgatccgcctccgcgaccgggtggtggaggacagcgcgctccagccactgacgctgaaacttgatccgggatccaagaccaccggcattgccgttgcgcgcgtggcagaggcacccgccggatacacgcacgagacagtgcatctcgccgaactggctcaccggagcgatcaggtctgtcgtcagatgcagcaacgcgcaaattaccgccgacgacgtcggacagccaacctccgttaccgagctccccggttccgcaatcggcgtcgagcggtagggtggctcggcccatgcctccggtcaagggttggcaacgtggtcaatgcagcgcggatgtacgcgcggctcgcacccatcacacgcgttgacttggaactggtcaagttcgatacacaaaagctccaggcttcagagacctccgggatcgcgtatcagcagggcacgcttgccggctatgaagtccgtgagtacttgttcgaaaagtgggggcggaagtgtgcgtactgcggtgccgaggacgtcccgctccaaatcgagcacattgtccccagaagccgacacggttcgaatcgcgtcggcaacctgacgttggcatgtcgactgtgtaacgaggccaaaggaaaccgcaccgccgcggaattcggtcacccggaggtccaggtccgggctgacctgcccctgcgaggc

SEQ ID NO: 819 - DNA, 304 bp, Unknown
  Ga0187784_10040265 JGI
gtcatagaccccacggctgaagccggggggcttgctcgtcgagcctgtctatgaccaggtcaaggtcctgagcggccggacaccgcggtgacggacctacgttgcaggggaagccaaacgacccactccgggatgcttccccagtcccggactctggaagcgccggttgcagacaacctttggggtgtggacgaaacggatcggcgccgaaggcggccctgcaacattgccgaggggagcggctcgggcacgtccgcccaagcccgtcacgaggcccgtaagggcgcgtaaggaggtcaagatg

SEQ ID NO: 820 - DNA, 1008 bp, Unknown
  Ga0373634_0000655 JGI
atgataccagtattagatataaataaaaaaccattcttgccctgctcagaaaaaagggcaagaatattaatgtcacgtaaagaagcgaagccttattggtataaaggattattttgtattattttacaaaaagagccttcttcaagaagctatcaaaagatatgtataggagttgatcctggatcaaagatgagtggttatacggtaaaatctgttaaacacacattaatgaatcttcaggtgaaagcgcctaatcatgttaaagcggcagtggaacaacggaaaataatgcgtcaagcacgacgaagtagaaatactccgtatagaaaatgcagatttaatagatctgtaggtaaaagaataccaccatcaacaaaaagtagatggttacaacatcttaatattattagattaacatcaaagatgtatccaataaaagaagttgtagttgaggacataaaagcaaagaccttagagggaaagcgtaaatataatgttaacttttcgccattagaagttggaaaaaactggttttataatcaagttaagttgacctatcctttaaaaacatatcaaggatatgacacatacaatgagcgtcaaagattaggattaaagaaaacatcaaagaagttagataaagtatttgaggcacatgcggtagatagttgggcattatgtaatttagtattaggtggtgataagttaccagagaacaaaaggttaacatatttagagccattagtattttccaggaggcagttacatgtattagtaccatcaaaaggaaatattcgtaaaaaatacggatcaacgatgagccttggaataaagaggggaacattagtgcaacataagaaatatggatattgtttagttggtgggactattaatagcaggctaagtttacataatacttttaattataaaagattaactcaaagcgcaaaattagaagatttaaaaataaaaacgcatttaaaatataaaatggtgtttttaagataa

SEQ ID NO: 821 - DNA, 237 bp, Unknown
  Ga0373634_0000655 JGI
atataattatcaacagcctagcaataggtgctttatgaaaactttaaccaagactaagtaaagtaaatggagattagcttagacaagatcgcgctttgtgcggtcgcttgaagtcaactaagtcaataggtcgtggtagaccattatatattaaggatacctctctagtcctttttccctatattgacgagtagcgaagagaaattaaaacaaggtacgtaagtacaaaaaaataaa

SEQ ID NO: 822 - DNA, 1242 bp, uncultured Bacteroidales bacterium
atggtttacgttcttgataaagaaggaaggccgattatgccgactgaacggcatggcaaggtaagaaggcttttgcgtgatggcaaggctagtgttgtcagactccagccatttaccattcggcttaattatgatagtgacacctataaacaggaggtatgccttggcatcaaccctggatccaagcatttcggagtgtcagcttcatcagaaaagaaggagctgttctctgcggaagtcgtgttaagagacgatatcgttgagaacatctctacccgaagggaactccgtcgtggaagaaggttccgcaagactcgctaccgtatgccgagattcaaaaatcgaggtaaaaatgagggatggttggctcccagtgatattaacaggatagatatgcacatgaagatgattcgtaatgtgcatgatatccttcctgtcagcaaaacaatcatcgagatttcgaattttgacatacagaaaatccacaatccttccataaaaggtattgagtatcagcaaggcccccagatgggattctggaatgtaagggaatacgtgctttggcgtgacaatcatgtatgccgcaactgttttggcaagtcccaggatcctgttctagaagttcaccatatcgaaagcccgaagacgggcggtgatgcgccggataatcttatgacgctgtgcaagacctgtcatcaggcataccatcaaggcaaaatagatttgaaaggcaagagaggtgcatctgatcgcaacgcatccgcagtaaataaaatgaagcaaaaccttattgacagagcaacgaaggagttctccaacgtcagctttacgtatggctatattactaagaatacgagaataagtaatggtattgcaaaaagtgatagttccgatgccttctgcatagccggttgcatttctgcaagcaggttgccttatctgtttaagtgtagatgtgtccgcagacataacagatcacttcatgtctgcaaccctaaaaaaggtggcaagagacgaagtaacctcgctccacactggattgtaggtacaaggctgcaaagattcgacatcgttaaatgggatggaacacgttgctttattttcggcagttcggctggaagactctatctgaaagacatagaaggttcgcgtgttagtcaatcagctacagtcagtgcaaaacaagtcagatttctatcaaggaaaaaaggtagcatgataatgcaaattgttccttgctga

SEQ ID NO: 823 - DNA, 278 bp, uncultured Bacteroidales bacterium
gttgacaccctcgcacgtggctgttgactcaagcgtgtacaaagaagcggactagcctcagtcccgggacaccccgggaactacgttgggggtgaatgtataggcactccgggatggtcgcccaagtcccggactctggttggccagtggttaaaaggagcgaaagctacggtgctgctggtatatgaaaccaccccgcaacattggcgatgggcgcataacaggcgcaagcctgtattacaacatagttgtttaattaataaataaagagaattatg

SEQ ID NO: 824 - DNA, 1272 bp, Fischerella sp. NIES-4106
atgtcaaactatgtctttttgattgaccaaaacaaaacaccactgaatcctatacatccggcacaggctagaaagttattagattcaggtaaagctgctttgtttcggcgctatccatgtactttaattttaaagcgagtgatagagaatcctaccgtatatccacttgcgctcaaaattgatccaggttcaaaatttactggaatagctctagtaactaaccaaggtaatgtcatctggggaatggagttaaaacaccgtggtcaacaaatcaaagacgctctagagcatcgtttagcggtgcgtagaggacgacggaaccgaaacacccgctacagaaaagcgcggtttcttaatcgtaaacgtccagaaggttggttagctccatcattgcgacaccgcgttctcacaactgagacttgggtcaagcgacttcataaatttgcaccaatcggtttgattactcaagagttagtgaagttcgatactcaagctattcagaatcctgagatatccagcactgagtaccaacaaggaacactacatggttatgagtgccgtgagtacttgctggagaagtggaatcgtcaatgtgcttattgtggagtgaaggatgttcctctagaaattgaacacatccaacctaaatcaaaaggtgggtctgaccggatatctaatctctgcttagcttgccacaagtgcaatcaacgcaaaggaaacaaagatattaaggacttcctcaaaggtaagtctgacatattgaatcgtgttctgaaacaagctaaaacaccgctcaaagatgcagcatcggttaattccactagatgggctttgttcaatattttgaagtctttcggcgtgagcgtcagcacaggtacaggtggtcaaaccaaattcaatcggattcggcttgaactgccaaaagctcactggattgatgctgcgtgtgtcggagcagtcgaaaccataaaacttgtcacgaccaagattcttctcgtgaaagcaactggttttggtagtaggcaacgataccagacagataagtttggctacccacaaaaacatcgtccactacgtccaatatttggattttgcacaggtgacattgttcgtgctgatgttccaaaaggtaagtatgccggaacatttaccgcacgtgtttgcccaatgtctcacggatacggcgagtttgttattgacaaaaaacggagatcaatcaaattggagtacttaacacctgttcaccggaaagatggatacgactatgcctag

SEQ ID NO: 825 - DNA, 278 bp, Fischerella sp. NIES-4106
ccgaaaaacctatgcagaactagtcaaggctaggcatatctgtacaaagtcggggcgtgcagactaagacttttgttagcgcagcggcgcgatagcacggtctacgatttttgagtcatgacacctacaggtaaacgccagccagtagccctgtcggaagtggttaagtaatcggtaaacaggtttatagccgtagtgccacttccttaaaaagctcttaaatcattgtcgaggcaaactttacttagtaataaggatgacagaatatgtcaaactat

SEQ ID NO: 826 - DNA, 1134 bp, Synechococcus sp. PCC 7335
atgaacagtcgagttcctgtagtcgataataacgacaagccattaatgccgaccaaggcgagccgtgcgcgtcgaatggtgcgagacggtaaagcgataggtcaatggtcagatctaggtgtgtggtatatcaagctagttgcagaaccatcaggtgacgctactcagcctattgtggcgggtgtagatcctggtaaatcatattcaggcgttggtgttcagtcgggcaaacatacgctgtttagaggccatctggttctaccgtttaatcgtgttagagccagaatggatcagcgccgattgttgcgtagaggtcgtagaggacgacggatagatcgttctattccgtttgctcagcggtcgcaccgtcaaaagcgctttgacaatcggcgcggtaataaacttccgcctagcattagagctgctagacaacttgagttacgggtcattactgagctatcgaaactcttcccgattgttgccattggttatgagcgggtagcagctagaactaaaaaagggtgcaactttagtcctgtccaagtcggtcaagactgggctatcgaacaaatgagtaagttagcgcctgtttaccaaataaaaggatggcagaaagacggcaacggaacttctcaaatccgaaaatttctaggacttgagaaagataaaacaaacaaatcccacgcggaacctgagactcattctgttgacggcgttgctatagcatcaagttattttgtcaaattcaagtcatgtcatcggttcaaagaagatggtaaatcttgtttcggcagcgttggcataacgccatcagttttcaaaattatcactcggttcggcgcagtcaagcgaggtaagcaatacgggttttatcgtcgtcagctccattttgaggttccagccaaaggtgatgttcgcaaacgcaaaggcggtactgtcacaccttggctattcaggattggcgattttgtctcatctacaaaagggaaagcggctgtaactggctatatcggcggctacagcgaacccaataaagtcgtttctatctacgattggcagtggaagcgcatcgggcaatttttagttggcaaaacaaagttactaaggaggtctaacggattatgcgtagcgtag

SEQ ID NO: 827 - DNA, 238 bp, Synechococcus sp. PCC 7335
ttcaatgatccccacctgtaacgaggtgggggagtggtcggagataacccgaccgtaactgcgaatagctcactgagctaattacggtaacactaccaaacacttctctagtttggtttatctgtagggtctggaatctcagacagtagagtaacgcctagaaacaccgtaattagtgggttaagagacgaaacgaaagtttcacaaacatttattggattatctctaatgaacagtc

SEQ ID NO: 828 - DNA, 2184 bp, Parasutterella excrementihominis
  MISC_FEATURE (522)..(555): Any "n" represents any nucleotide
  MISC_FEATURE (1346)..(1346): Any "n" represents any nucleotide
atgccctgttcaccggcaaaagcgcgccttctgcttaaagagaagaaagctattgtggtaaggcgcacgcctttcactattcagctgacgattgcaacgggtgagtccaaacagccggtaagcctgggtgttgatgccgggtacaaacatgtcggcctttccgcatcaacggaaaaggctgagctttatgaatcagaagtcgaactccgtcaggacgtctctgatctgctctctgctcgtcgtgcgttacggcagtctcgccgtaaccgcaaaacgcgctaccgtgccccgaggttcgacaaccgcatccgcaccaagcgcaaagggtggcttgcaccatcagttgaaaaccgaatcaacgcgcacttgtcgcgcgtagaaacggttattcgactgctgccggtcacgaagatcaccgtggaaacgacctccttcgatatgcagctgctgaagaattcagacattgcagggaaagagtaccaagagggcgaacagctcggcttctggaacgtccgcgagtannnnnnnnnnnnnnnnnnnnnnnnnnnnnnnnnncgctaccgtgctccgaggttcgacaaccgcatccgcaccaagcgcaaagggtggcttgcaccatcagttgaaaaccgaatcaacgcgcacttgtcgcgcatagaaacggttattcgactgctgccggtcacgaagatcaccgtggaaacgacctccttcgatatgcagctgctgaagaattcagacattgcagggaaaaagtaccaagagggcgaacagctcggcttctggaacgtccgcgagtacgttcttttcagagacgggcacgtttgtcagcattgtcacggcagatcgaaagacccggtgcttaatgttcatcacttggagagcagacgtacgggcggtgattcgcccggcaacctgattacgctttgtgagacgtgccataaggcgcttcatcgcggtgaaatcacgctgaaggcaaagcgcggacaatcattccgtgcggagaccttcatgggaattatgcgccgggaggttttggaccgcctgaaggcgtcgcatccgaagctagaggtgcaaaacacctacggctaccggaccaagcatgcgcggatctcgaatggcattgccaaatcgcattgtgcggatgctttctgcatcgccggcaatcttggcgccaaaaggctaggcgaattcctattccagaagcagactcgccggaacaaccggcagattcacaaactctccatcctcaaaggcagcctgcgaaaacgcaaccaggcgccctttgaggtcaaaggcttccgtctttttgacaaggtagcctaccagggggaagaaggctttangaagatcaccgtggaaacgacctccttcgacatgcagctgctgaagaattcagacattgcagggaaagagtaccaagagggcgaacagctcggcttctggaacgtccgcgagtacgttcttttcagagacgggcacgtttgtcagcattgtcacggcagatcgaaagacccggtgcttaatgttcatcacttggagagcagacgtacgggcggtgattcgcccggcaacctgattacgctttgtgagacgtgccataaggcactccaccgcggtgaaatcacgctgaaggcaaagcgcggacaatcattccgtgcggagaccttcatgggaattatgcgctgggaggttttggaccgcctgaaggcgtcacattcaaagctagaggtgcaaaacacctacggctaccgcaccaagcacgcgcggatctcgaacggcattgccaaatcacattgtgcagacgctttctgcatcgccggaaatctcggcgccgaaaggctcggcgaattcttcttccagaagcagacgcgccggaacaaccggcagattcataagctttccatcctcaaaggcggcattcgaaagcgcaatcaggctccctatgagatcaaaggcttccgcctttttgacaaggttgcctgccagggagaagaaggcttcattttcggccgtcgatcatccgggtactttgatgttcgaaagcttaacggaacccacatttcagcaggcatcagctgcaagaagctgcgtctgctggaaaagagacaaacctatttaacagaaattcgaaaggagaaggcgcttcctcctctgcctgaaggcaggggtctccgcgcctaa

SEQ ID NO: 829 - DNA, 246 bp, Parasutterella excrementihominis
gtcaactacctcggcctaaaggccgaggtttgaaaaagcctctagttgactagcctcagtctgctgttcggggactactttggtcgggaatgcacaggcaccgcgggatgcagatcctagtcccgcgctctgcggccgatggttaaaagctctgagaggtaggagcggtgctgtcggcttgaaaccccttccaacattggcgaaggatcacaaccggtcgaaagaccgaggagataaaacttgaaa

SEQ ID NO: 830 - DNA, 1812 bp, Human gut metagenome
atggtgtatgtacaggacatagatggtaaaccgatgatgcctacgacaaggcatgggaaggttaggcgattgctaaaagacaacaaagcggtcgttgtgaacacatgtccttttaccatcaaattgatgtacaagacatcagattacaaacaagagattgtgttaggcgtcgactcgggaaccaagcatgttggtttgtcagctacgacgaaaagcaaggagctttacgcaagtgaggttattctaagaagtgatgttgttgatcttctatcaacaagaaggggattaaggaggactagaagaagcaggcttaggtatagaaagcaaagattcaataatagggtaaaatccaagaaggatggatggattgctccatctgtccgccataagattgattctcatgttagaattatcagttttgtatattctatactacctgtctcaaaattgattgttgaggtagcccaatttgatactcaaaagatcaagaatccagagatatcaggtaaagagtatcaggaaggtgagcaattaggattttggaatgttagggagtatgtcttagcaagagacgggcataaatgccagcattgtaagggtaagtcaaaagatcctatccttaatatccatcatattgagtcaaggaagataggaggagattcaccatccaatttaattactctttgtgagacttgtcataaggaatttcataaaggaaatatcaaattgaaagtaagcagaggcaagtcacttcgtgacgcagccgtcatgggaatcatgaaatggaagttgtacgaggagttaaaatccagatacgataacgtttcgatgacgttcggatacataacaaaatataatcgtataaaccatggaattgaaaaatcccatgtatccgacgcttttgtgatttcaaggaattttaattcatgtaggcttggatattattacaaacgtaaattagttcgtcgccataaccgtcagattcataagatgaaaatattgaaaggaggaattagaaagcgaaaccaggctccttttaaagtttttggatttaggttatttgataaagtgatgtttcaaggagaagagcattttatttacgcaagaaggctttctgggcaatttaatattcgggatattaatggagagaataagaaagatgtatcttgcaagaaattaaaatatgtcagccggggcggattaaagcttgaaaaggctgtagaggtatggaagcctgatatagaaggaagcgtatgtatagatgtcggcgcatccacaggaggttttaccgactgtatgcttcaaaacggcgcgaagaaagtgtatgcgatagacgtaggaactaatcagcttgcatacagcctccgtcaggatgaacgtgttgtatgcatggaaaaaaccaatatccgctatgttacagaggatgatatatctgagaaagcggactttgtaacaatagacgtcgcatttatttcactgaaaaaggtgcttgagccggtgtataagcttatgcacaaagaaagtacgatagtatgtctgataaaaccgcagtttgaagcaggccgtgaaaaagttggaaaaaaaggcgtagtcagggatcaaacggtgcatcttgaggttgtaaccgatattataaaatatgtcgatggacttggtttttacatacttggacttgaattttcacctgtaagaggaccggaaggaaatatagagtatcttatttatatgaagaaagacgatgaagctaatgataccggatactggcttgatacggcaagtgatgttgtaagcagagccaattctgcactttag

SEQ ID NO: 831 - DNA, 266 bp, Human gut metagenome
gttgaaattcatttaatattttatatatatctatataggatcaggttattagcctaagtcttgaaataaagactacgttattggagaatatatagttacctacggatgtttatccaagtccgtagctctaaggtaggtgattaaacagggattgtatttgggttccagtgttgcctatataaaaccttcaataacattggcgatgggtactaacagggttttgccctgacttatgttgaataaacattgaattagtttgtaaaatg

SEQ ID NO: 832 - DNA, 1320 bp, Unknown
  Ga0307928_10013462 JGI
ttgaaaaacgtaaacagagtttttgttttaaatcatgacaagacacctcttagtccttgtcatcctgcaagagcaaggcaacttttgtttaaaggtaaagcagcaatttttagaaagtacccttttactattattttaaagaaccaaaaagttaatcctaagtttcaaaatactcaagttaaaatagatcctggaagtaagaccacagggttagctattactttaaaaggaaaaaataaaggatggatcttaatctgggctgctaatttggaacatagaggacaatatattaaaagacttttagaaaaaagaaaaaatgttagaagaagtagaagacatagaaagtgtagatatagaccctcaagatttttaaatagaacaaggaacgaagattggttagctccttctattttaagtaggattaataatgttattgtctgggtagaaaaacttcaggaattttgttacttaagatcttgtattatggaagtagcaagatttaatatgcaaaaaatgatgaatccagaaataagaggagtagagtaccaacaaggaactttacaaggatatgatgttagagaatacttattagagaaatatcacagaacttgtatttattgttctaagaaaaatgtacctttggaaatagaacatgtagttccaaagtctaaaggaggaagtaatagagtatctaatttaactttagcatgtaagatttgtaatcaaaggaaaggtaatcaaccaattgaatttttcttaaaaaggaagccagaacttcttagaaagataaaaagaagtttaaaagtatctttgaaagatgcagcagcagttaacattattagaaaaaggcttagaaaggaagttgattactgtattgaaactaaaacctcaacaggtagtataactaagtttaatagaacaaagcaatattacaagaaagatcattggatagatgcagcttgtgtgggaaaaagaagtggcagaaacgtaagtattccagataattttcaaccacttttaattaaagctatgggacgaggacgtagacaaatgtgtttggtagataaatatggatttccaagagctaaatctaaaagtagaaataaaattattaaaggttttcaaacaggagatattgtaaaagcaattgtaacagaaggtaagaaagttgggacttatgttggaagaatagcagttaggaacaagggtacttgtgatatatctaccaaagaaagtttaattcaaggcataagtttaagatattgtaaattgctacaaaaaattgatggatattcttataaacttttaactggaggttag

SEQ ID NO: 833 - DNA, 266 bp, Unknown
  Ga0307928_10013462 JGI
gttaatcattacgtaccacagaattataattctgtgactgattaagtcgacgtaatcagactaagtacttagagtactacgttaaggaagaatatataggtactttggaatgcttctccagttccaaactctacgattaggttttaaacagagataaggtcactgtctcagtgaatctaatactaaaccttccattaacattgtcgaggagaacataacagattttatctagtaggaggaatcctaaattgaaaaacgtaaacaga

SEQ ID NO: 834 - DNA, 1329 bp, Lactobacillus harbinensis DSM 16991
gtggtgactgaggtggttcaaaatagaatatttgtcctcaatcaggatgggcaagcattgatgccctgtcgtccgtcaaagtgtcggcatctgcttcattgtaatcgtgctatcatagtcagccatactccgttcaccatccagttaaagtatcagtcggggtcttgcttacaggacgtgtcaattggtgttgattcaggtcagcgacatattggacttgcagtaacgagcaacgaaaaagtgctttggcaaggagaagtgactctgcgacaaaatgtaaaaagccttttagatacacgtcacatgtatcgacacacacgtcgacagcgacacacacgatatcgaatggtacgcttctcgaaccgaaagcctagagatatccgcttgggcgtgtggttaccaccatccgttcgacaaaaatgcgagcacaatatccaatggattaatcgagtgcgtaatgttttgccacaagctgatatatctattgaagtggccaaatttgacgtacaaaagttgaaggatccgaccattcacggtatcgggtatcaacaaggcgacgcctttggttatgaaaatgtgaaacaatatgttctagaacgtgatgaacatacctgccaattgtgtaaacgcaaaattgataccgagacgaagaaaacattgaagttgcacattcaccacatcgtttacaggagtaaaggcggtactaacgcagccacgaatctgctgacggtatgtactaagtgtcacacagatcgaaaccatagagccggcggccctctttatgcgttatttgagcaaaaaaagacaataccaccgcttaaaaatgccacatttatgaatatgttgcgtaatcgattgcttaccgcttttcctgaggcgcatttcacctatggctacatcacaacggttcagcgaaaaaagttgggtttggcaaaagcacattatcgcgatgctgtagcaatcagtggaattcaacaaattattgaagagccaaaatcagttgtgatgtttgatcagtttcggacgaaaaaacgatcattgcatgaagcaacggcacgcagggggcgaaagcaaaagaatgttactcaaaaacgagtgaaaaagaatacgaagaaagtaaaaggttggtgcttgaacgattatgttcgaatcagtgatggacgttgcgggttcatcaccgggtttagtggtctctggatggctcatattagggatcgtcagggtggtttggttaaaaagctcgtgagtctgactaagcttgcctttcttcatcacacaggaacttggaggtgtacaactttaccaacagatgtctatgacatgcaataa

SEQ ID NO: 835 - DNA, 341 bp, Lactobacillus harbinensis DSM 16991
gtcagttacccacggcgaaagccgagagcaaatatgttcttaactgactagcctctgtctagcaatctaacattaccagactacgttaagtaggtgcacaccttcagatggtgccctagtctgtcgcactgtgagggcaacgtaaacagcggtgagggtgtagccgcagtcgaccctgacatcatccagtgccgtctccacaggcacggaccctatttaacattggcgaagggcaatccacacatgttagtctcattgctgcatgtgatcagccccttacttgaaggttggctgataaataaaaaaacaaaggggtggtgactgaggtggttcaaaataga

SEQ ID NO: 836 - DNA, 1266 bp, Human gut metagenome
atgcgcggtcagcccttgatgccgtgctcgcctgcaaaggcgaggcatctgctcaaggcaggcaaggccgcggtgagacgacgaacgccgttcacgattcaacttcgaatcgccaccggtgaaacgaagcagagcgtgacactgggcgttgacgccggcgcaaagcatgtcggcctttccgctgcgacggaaaaggaagaggtctttgcgtccgaagtcgaacttcgacaggacatcacggggcttctggctgctcggctctcactgcgtcgtgatcgacgtcatcgcaagacgcgctaccgtgcgccgcgctttttgaaccgtgtccgatcgaaacacaagggctggcttgcaccgtccgttgaaaaccgcattcaggcgcacatgtcgcgcattgatgcgatctgcggactgctgcctgtcaccaagatcgtgatcgagacggcatccttcgacattcagaagatcaagcatccggatgtcgagggcacggactatcagcagggcgatcagctcggcttttggaacgtgcgtgaatacgttctctttagagacggtcacgtttgccaacactgtcacggttattcgaaggacaagatcctcaacgtgcaccacctcgaaagccgccaaaccggcggcgatgcgcccaacaacctgattacgctctgcgagacctgccacaaggcctgtcacgcagggaagatcaagttgaaggtcaagcgcggtcaatcgttcagggcggaagccttcatgggcatcatgcgttggacattgctcgatcgcatgcgcaaggcgcattctggtttgcctgttgagaacacctacggctatctgacgaagaacacgcgcatcactctgggactccccaagacgcattgcgtcgatgcatactgcatcgcggggaacctcaaggccgtacgaagaggcgtctgcctccatcagcgacaggtgcgcaagcacaaccgtcagattcacaagtgtacggtgctctcgaagacgcttaaggacggcacgaagatcggataccgaaagctcaatcaaacaccgcatctggtcaagaacttcaggctcttcgacaaggtgagatgtcttgggcaaaccggcttcatcttcgggcgaagatcgtccggctacttcgatgtccggaggctggacggcgtaaagctttcttccggcatcagctacaggaagctcacgcttctcgaaaagagaagcacctatttaaccgaacttagaaaggaggacggcgcttcctcccctgtctga

SEQ ID NO: 837 - DNA, 277 bp, Human gut metagenome
gtcaataacccctgtctgaagacagaggcttgaaagagcctttattgactagcctcagcgcccctctttcgagaggcgctacgttggttgggaatgtataggcaccgtgggatgtacatcctagttccacgctctgcggcctgtgattaaaagctccgagaggtaggagcggtgttgcaggcaccaaaccccttccaacattggcgaaggatgtcaacccggccttcgggccgtgtaggcggaacctgcgggtatccgcaaaggagatgctttgaaa

SEQ ID NO: 838 - DNA, 525 bp, Unknown
  SAR324 cluster bacterium isolate NORP136 Contig_source1382A_8018, whole genome shotgun sequence WGS
ctggtaacattagcgaggcacacattacccggcttgccgggattctcttcaaggagaaaagatgcaacgagtattcgtgctcgatacaaagaagaaacctttaaccccttgccgacccaagagagcaaaacaattgctaaaacaaggtatagaaagccccgcttccttaatagaacactgcctcaaggctggctagctccatccctgctcagtagggttttcaacatagaaacatgggttgaaaagttatgttgttttgctccagtcaaagcgatatctcaagagttggtacgcttcgacatgcaacagatggagaacccggaaatttccggtaaggaataccagcaaggcactttagctggatacgagacaaagcaatatctcttggagaaatggaatcgtacttgtgtctattgtggagcgcaaaatgtacccttggaaatcgagcatatcattccaaaaagtaaaggtggatccaatagggttagtaacttaactcttgcctgtgtgtcttgtaatcaaaag

SEQ ID NO: 839 - DNA, 246 bp, Unknown
  SAR324 cluster bacterium isolate NORP136 Contig_source1382A_8018, whole genome shotgun sequence WGS
gtcaactacccctccctaaagggaggagcttgaatagctcatgttgaccagcttaagtttttcgaaaactacgttaccttggtgatcttaccctggagtgcttgccagctccaggctctaaggttggatgttaaacagactgagggtataggtcagtgcattcagtgtaaaaagccctggtaacattagcgaggcacacattacccggcttgccgggattctcttcaaggagaaaagatgcaacga

SEQ ID NO: 840 - DNA, 1074 bp, Unknown
  Ga0395987_006804 JGI
atgttacgagtacctgtggtttcaaaagacggcaaacccatcagccctacaattccatccaaagcaagaaagatgatcagagatggcgtggctacgccgaagcgcgacaagctgggcaacttctacatccaaatgaacatccctgtcggcgagaagattccccacgaaaccatcgccggcatcgaccccggaaaactctactccggcattgccgtccagaccccgaaagcaactctctggatcggacatctggtacttcccttccctgaagtcaagaagtccatgaaaaaccgaaagcagcttcgccgtgcaaggcgctaccgcaaaactccccaaagagagtgccgcttcctgcaccgcaccggccacaagatcccgcccagcattcgatctaaccgggaaatggaataccgggtgctgaccgagcttcgtaaaatctacccgattgacgaagtagtctacgaagtcgtcaaggccaacggttccaaatccttctccccggtgatggtgggccagaagtggcagatcaaccgtatctctaagatcctgccggtaactattcgtgagggttgggagacatcaacgatgcgaaaacatctcggccttgagaaaagtagaaagaagtccgaagcatcgccccagacccacgccgttgatggcgttgcgctggcagccaccaacctgttgagttacgagtcatttgtcaaagccaacgaacacggccatctctggtcaggcgaatgcactgtgaccgatgccccattctccatcatccaaagaccactgctctttcgccgcagtctccacgtgcagaacttcgccaagggcggcgttcgtaagcgtcacggtggaacaacgacaccctacggcttcagaaaaggcgactacgtggaagcagaaaaggccggcaggattgtccggggctatatttccggctacagcgaagccaaaggcgtgttaagtattgctgatcatcaatggagaagaatcgggcaattcactccatcaaaggtgcagctgttgcagagatcgtgtcatttacttgtagaacacaaaaattgcgtcagcatctga

SEQ ID NO: 841 - DNA, 270 bp, Unknown
  Ga0395987_006804 JGI
gtcaactacccccgcttagcccatccggggcttgaagcgggggcttgcagggtgcagtcccgcatcgtaagagctgactaggccacgagaaattcgtagcggcatctgcggaccaacccagtagggcgtttttcctaactctattttcggatgggacgagactcacccgccaggcaagcagcaatgcttgcgacacagccgcagattgcaaggtcgaaggaacgtcgtaaggcaaatactccacaaggagggggcttatcccaatgttac

SEQ ID NO: 842 - DNA, 1344 bp, Unknown
  GENOME_ACESSION: mgm4743561.3  MG-RAST
  MISC_FEATURE (1167)..(1320): Any "n" represents any nucleotide
atgagagtattagtggttggcgcaaacggcatcggcttgatgccgacaacgccaaggaaagcgcgggttcttctgaaatgccacaaggcagttgtatgtcagaagaaaccgtttaccatccgtctgaactataagacgggttgtgcgacgcagcactgcgagcttggcatagacacaggtacccagcatatcggggccggtgtcatggtcgggccggatgtgctccgaaaggatgaatgggtgcttcgttccacaatgacaaaacggtctctgatagaaacttgtaagtcaatgcggagaggcaggcggtatagaaataccggctaccgtcatccgaaattccgtccgcataccaagaggacatactcggagaaaccggtgcttcggcacaagcataaaacacactggatcgttaagacaaacagttttaccacaaaccgggaagcagggtggctgccgccttcggtgcagtcgaaggttgaccaccatatccgcaccatcgaaaaatacctgaaagctctgcctctggacacgcatatgacgctagaacttggacgttttgatatgcagaagatcaaaaatcccgatatcgagggaatccagtaccagcagggacggctctaccagtatgaaaatattaaggggtatgtccttgcacgccagcattacaaatgtgcgatttgcgggaagaagtttggctcaaaacggaaggacggttccatcgtcaagatgaaaatgcatcatatgcattatgtctcaaaaggggccacgaacaatcctgatgagtatcttggagtttgtgaccagtgccatacgccggaagcgcatgataccggggcattggaaaaactccgcaggaaggtaagggaccaggccaggggcatgcgcgacatgacaatgatgaacattgtcaccgcccgtctcaaaaaggctttcccgaaaagcgacaaggtctcctacacctacgggaacatcaccaatgcggaccgtaaacagatgagacttccaaaagctcatgcgtatgacgcagttgcaatcgccaaacacgcagccatcgtgcatgataatgattacacagtgcatgacgacgaaggggaaaccatgtatgtgcagcaccggaaaaagaaacggtccctgcatgaggcaaacccgcggaagggcagaaannnnnnnnnnnnnnnnnnnnnnnnnnnnnnnnnnnnnnnnnnnnnnnnnnnnnnnnnnnnnnnnnnnnnnnnnnnnnnnnnnnnnnnnnnnnnnnnnnnnnnnnnnnnnnnnnnnnnnnnnnnnnnnnnnnnnnnnnnnnnnnnnnnnnnnnnntaccaatacgtcgtgccgtgttga

SEQ ID NO: 843 - DNA, 322 bp, Unknown
  GENOME_ACESSION: mgm4743561.3 MG-RAST
ttgaatagccgagcatggtcgtaagactgtgcaaagctgtttggtgacagtatccttcgggatacagatgactagctgaagccggacacattgcagaccggctagattccaatcgtaacgacatgaatgcatgatgccctagtgcagtaatgtccgggcaacatatggaggtgtgagaagccgagaatgacccgatgtttcaagcggctgggattgcagcgaagggcaactcgcgagtacccgcaatgggggaaaacaggcgacgtggagacacggacaggccggtatcgtgcctgtcattatcggaaaggaactgatgaga

SEQ ID NO: 844 - DNA, 1383 bp, Unknown
  Ga0172381_10008462 JGI
atgtacgtaccagtggtagaccaaaatcaaaaaccgttaatgccaacgattccaagtcgggcaaggaagtggattaaaagtggcaaggctactccgttttggaagaaaggtgtattttctgtgagattaaatgtggaaccaagtgattctaaaatacaagagattgcagttggtgttgaccctggttctaaaaaagaaggatttacggttaaatcagaactacatacttacttaaatattcagacagatgcagtaacttgggttaaggacgctgtaaaaactcgtagccagatgcgtagaactcgtaggggccggaattgtccacatagactttgtagaccgaatcggaatatttataaagtttttatgccaccatctacaaaagcacgttggcaatggaagttacgaatcctaaattggttaaagaaaatatacccgataacttgcgttgtggttgaagatattaaggcgtggacttataaaaatgctcgtaaatggaatgtcagattttcaccattagaagttagtaaacagtggttttacgatcaaattaatgtgcaatttaaacttgaaactaaacaaggatacgagacaaaacaaatgcgtgatgagtttggtttgaagaagtctagtaataaattatctaacaaatttaatgcacactgcgtggatagttgggtgttagcgaattggtttgtgggtggtcatacaaatgttgataacaaagacatgctcttaatcacaccaattcaattccatcgtaggatgttacacgcattgcaaccggttaaaggcaatatccgtagaccttatggtggaacacgaagtttaagttttaaacgtggtagtctggttgaacatattaagtacggattgtgttttgtgggtggatttggttctattcgattgtggttggtattcggaggaattactatgagtactaacctaatctttattgatgtggcggggggcatttgtcagttagttattggtcaaaattatcgcaatttgtaccaacaaccacagaccaaagaatctacaaatcaatgcagacattttgcggcacctccttctaaaaatcgctttttaccgtttataaaaagcattctcctcgaagtcggttattttgtcccccgccacttctcaattataaaccatcctgtgtattgttttgtgcaaaagtcattatctattgtatcatctaagcttttactgcataatccccttatagaaaaaataagggggattaagtcatgcgccttttacggtctatcgggttattatttttacttgtttttgccactaatgcgttatacgttcaaggttcgtatctactccataatcacactcaagggatgtggaacgctgtgtgggatatgttaa

SEQ ID NO: 845 - DNA, 226 bp, Unknown
  Ga0172381_10008462 JGI
gtcaattaccgtcgcctaaaggcggacggcttgaaagtgagacagaagccaactgttaaattttcaacgtaagaattagactagacaaacccaaagtggagactgaactaactgatcgtggtagatcgaactacgctacggatgccaccctagtctgtagtctctaggttagtcagaatgtcaaagggttgtagaaactcgcaaagaggtttaaaacaaaatgtac

SEQ ID NO: 846 - DNA, 1275 bp, Unknown
  Ga0268280_1002972 JGI
ttgattaaagtttttctgcttgacaaatccttaaaagcgcaggatccggttcacccggcggtagcccgtatccttctcagcgagcgcaaagcacgaatacatcgtgctcagccgttctgcatccgcctccgcgtgtcttctaacaaagccacgcatggtcttcaactcaaattagaccctgggtcaaagacgacaggcatagccttggtaaatcatcaaagcggcgaagtcgtgtggggagcagagctgacgcatcatggacagctgataaagaagaaattggagaagcgcttagcacaacgccgtgctcgtagatcacgtaagacacgctatcgccctgcaaggttcttaaacagaactaagccaaaaggctggcttccaccttcgctagaacaccgcttaggtaacgttatgacttttgtgcatcgcttgcgtaagcttgctaacattactggaatctcgctagagcttgttaagtttgatacgcaggctatgcaaaatcctgaaatctctggtattttatatcagcaaggtgagctagcaggttatgaaatgcgtgagtatcttcttgaaaaatttaatcgcacttgcgtgtattgcggagctaaaaatgtaccgttgcaagtggaacatgttgttccaaaggctttaggtggttcaagtcgcattagcaatctaacacttgcgtgcgatgcttgcaacaaagctaaaggtgctttgctcatcgaagaatacttgaaaggcaagccagcgctactcaagaaaattaaagcgcagctgaaagcgccacttaaggacgctgctgctgtgaatgcaacacgctgggaactttggagacgcctgtcggctttaggcttaccagtggaatgtggctcaggcgctttaacaaaatttaatagaaccaagcagggcctacctaaagctcattggttagatgctgcttgcataggtaataacacacccgctttgaagttaattaaagtggagccactttatataaagtcttacggacgcggttccaggcaaatttggcaaatggatgcttctggttttcccaaacgttcacgaactaaagaaaagacaaagtttggttttcgtactggcgattgggtaaaagcaatagttcctaaaggtaagcatatgggggtacatattggaagagtaggaactagaagtaaacccagctttgctgtaggtaaagtagatggaattaatttaaattgtattttacttatgcagcgtaatgatggttacgaatatagttatgggacgtag

SEQ ID NO: 847 - DNA, 282 bp, Unknown
  Ga0268280_1002972 JGI
atcttcaaagactgatacttaacaaaactgtcgaggttgtaaccttctgttaagtatatacttaacatgggttacccgactcagtgtttgcagtttaagcaaacactacgttatttcggttatgacaccatgggatgcttcaccagttccatgcaactgtcgcctgcggttaaacagggtaattccagtgctgcaggcttaacaagccattataacattgtctaggtgacgtgggcttaggcctatatacccgctaatcacggagagtattttgattaaagt

SEQ ID NO: 848 - DNA, 1362 bp, Lactobacillus salivarius
atgatgtcagaaaagaaaaaagttgattatatctatgtagtagactccaacgacacaccactcatgcctacttcacgtttaggtatggtgcgtcgttggttgaagacaggacaggcaagatggtacggaaatagtcgcaagactatccaatttgttagacctgttactactaatactcaaaaactaacactaggagtagatgctggttttcacttaggtttatcagttgtaggtaatcagcgtgaatattatgcagctgaaagtctaagaaaatcagaaaaagatcgaattactagtcgaagagaattaagacgtactcgaagaggacgtttaagacatcgtaaggctagatttaataatcgtagacgcaaagacggttggctagttcctagtattcaacacagactagattttacgattaaagaaatcaaacgcttatatacgtttttacccattactaatttagtcgttgaagttacaccgttcgacaaccaaaaactactaaatccagatattaaaccttggcaatatactcaaggcaagatgcacggttttaagacgattaaagattatcttctagctagggataattatcgtgatgctttagatggaaaacaatatccagctagccaattaagagttcatcacttagttcaaagaaaagatggtggctctaataaaccagataatttggttttgttatcagatgtaaatcacaatcaagctaaccataataacggtatcttagctaagttgaaagaaaatcgtcaaaagaccattgattatcgtggagcttattttatgagtgttttggcaacaagattaagcgattattttgaacattatacaacaactcaaggttatctaaccgctaacttaagacaaaagtataagattgaaaaatctcacttaaatgacgcttttgtgattgctggcggaactgatgtaacgcttagaatgaacaacgtttactcaaggcaaaaactaagaaacaacaaccgaagtttacagaagttctatgatgctaaatatgttgatagccgagatggtaagaaaaagactggtaaagaattaagttcaggtagaattaaacgttccaaagagcttaattatgataatttaagacagtttagaaaagaaaaagttaaaaaaggtcgtgtttcgattagacgaaatcactaccagttaagaccacatgatgttgtgctaaatacaaagactaataagattgaaagagtcgctagtgttcaaaacaatggaaaagtagttagatttcaaactggtaagacttgttcaattaaaagtgtagttagtttatatcatgtgaatggaatattagaaaagaaaatggaaaatatttag

SEQ ID NO: 849 - DNA, 295 bp, Lactobacillus salivarius
acaagttaacagaaccgccgactaaagtaggtgacttgtagaaatacaagctggttgattagcctaagttttaagtaactacgttagggttgaatagataggtactttggaatgccaccctagttctaaacactatggttaattattaaacagagctgaggttcaggctcagtgtgattaacattaaaccaacctataacattggcgaagggtacacacgtgccaactttatgttaggtgcgaattatgattgaaaggagctggcatgatgtcagaaaagaaaaaagttgattat

SEQ ID NO: 850 - DNA, 1467 bp, Unknown
  Ga0233437_1033046 JGI
atgttagtgtttgtgatggacaagaatggtcgaatgggacatccgactagtaagtgtgggatgattcgacggaaattaaaacaagggaaagcgaagattgtacatcgctttcaagacacgattgttgttaagatctttgatctagttattgatgaagataagacagtcgattgtaaatttattctagggattgatcctggatattcgaacattggttactatgtgatcaaagttgctgatggtaaagtgtatgacattctttctggagaattgaaaacgagaacagagaagatcaagggtttgttattagacaggaaaatgtatcgaaatggtcgtcggagacatcgtcgaaaacgtgtccaacgattacatgggtcagtaaagtttcgacacccaagatggaagaacaggaagaaacatcagtttcaaccaactcatatacatcttattcagacgcatttgaatttgattaagaagatacattcgattgtgaatttcgatgaaattaatatcgagtacttcaagtatgattcacaaaaggcactgaatccagatattaaaggcgttcaataccaaagaggtatacagtatggtttcgctaatactagtgcatatgtattagatagagatggttataagtgtcaatcatgtggcgaaacagatattagtttgaaagctcatcatattgtcgagagaactgataatggttctgatcgtccagaaaatcttgtaactgtttgttataagtgtcaccatgagattcatactggtagaagaaagtgtcctgtgggtctaataggtaatagcactcaatttcgagattcaggtgtattgaattcgtgcatgccagcattattccgattgttacaagatagtaaatttatggtaagaaagactttcggtagtgctactaaagtgattcgagagtatcttgatattcctaagacacatcgaacagatgctttctgtattgctatcgaacaactgagtgaagatattaaatttgatgactctacaggtaatgttgttaattatcaacaattccggagacacaatcgaaagtttgtaaatcgatttgaagatcgtaagtattatattagtgggattcgaactgttcaagcaaggaatcggaagagacgaagtggtcaagataagaaagatgatctatcattagaagatttccgtcagacaacatttaatgggtacgagaatttaatcgctaaagctggtggagtaattatgaataatcctcatacttatgttccagacaaacgatccggaatgaaatttcgtgtaggtaatcaatataagttcaagaaaaaaattcgaacaattattagtactagtaatatccagcaacgggtgttctatgaaaagattgagaaaacacgtttatttgatacgtttacacaaattcgaaagcatggagaacatcttttgtgtaattcgggaatcgttcccgtttga

SEQ ID NO: 851 - DNA, 286 bp, Unknown
  Ga0233437_1033046 JGI
gtataatcatgcaagtaaaaccgtgtggatttcgaatagcgaagcattataaatatagattagtcaactactgggagcatagtactcaggattgacacagacaatgaactagagttcaccggtgagtgccactcccagcttgctgtaagtattattttaaaaactggaggtttgaatcctcattgtacgaaagtaggtaacgaaatcgtatattactctagctcagtcgagggagactggtttcgactaactttaagttaactcgatcaaggagtttcaaatgtta

SEQ ID NO: 852 - DNA, 1275 bp, Ga0209175_10000039 JGI
atgtctaactatgtttttgttcttgataccctcaaaaaacctttaactccctgtaagccatcaatagcacgaaagttgttaaatgctggcaaggcggctgtgtttcaatggtatccatttaccatcattttaaaaaaggaggttgatgccaatcctgaaccactggaactgaaactagatcccggttctaaagtgacaggaattgcactaaaacaaggcaacaaaattatttttgctgccgagttgattcatcgaggatacgcgattaaatctcgtcttgattcccgtcgcgctattcgacgttctcgacgaaaccgaaaaactcggtatcgtcaagctagatttcttaatcgcactcgttcaaagggctggttaactccctccctacaacatcgagtagaaacgacgatgacttgggtgaatcgcgttcgtcaacttgcacccattggatctgtgtctcaagaattggtgagatttgatctgcaaaagatggagaatcctgaaatttcagggattgaatatcagcaaggggaattacaaggttacgagattcgagaatatctacttaataaatgggagagaaaatgtgcttattgtcgggcagaaaatgtgccgttacaagtggaacatattaaacccaaagctaaaggtggaactaatcgaatttccaatctttgtctttcttgtgatatgtgttaccagaaaaaggggactcaagatattgggcaattcttagcgaaaaagccagaagttcttcaacgaattttgtctcaagctaaaagacctcttaaggatgcggccgcggttaattcaactcggtgggcgctgtttaatcgactccaagaaacaggtttacctgtctcaacgggttcaggtggattaactaaatttaatcgagtgcgattaggtttacccaaatcacattggttagatgccgcgtgcgtgggaaaagttgattcactagagattctgacaactcaaccattatgtatcaccgcgaaaggatggggatgtcgccaaatggttcaaaatgacaaatatggttttcctcgaaagaattatcgggctaaacaaaaagtgaaagaatggaaaacgggtgatatcgtttctgtaatcaaaggaaaatgggcaccaataacaggaaaacggatcaaaacggttcgatttcagggtaattttgatgtccgattagatcgctcaaccgtgatctgtgtatctcgaaatcacctcaaggctattcatcgccttgatggatacgattatacctttgtctaa

SEQ ID NO: 853 - DNA, 294 bp, Unknown
  Ga0209175_10000039 JGI
acgcgtcgatctgtccagattcctgacaagcaattaaaatagggacttactgaaaccctagacaattcgggacaatccatgaattctaagtaagtccaggctcaggatcagaccaccgttatcgggaagcgttaaagttcctaccttgggatgcttgccagtcccaagccccttaaccgaacagttaaacaagcaagggtttattcaaagctagtgctgtttggatagtaccgactgataacttagccgaggcacacattactgaaaaggtcagacacaaccatgtctaactat

SEQ ID NO: 854 - DNA, 1557 bp, Unknown
  Ga0306922_10010477 JGI
atgcttcctcagtcccaggctcttcgagttgccgctgcagacaagccagggtcagcgcgaaacgggcgacaacagacggcttgcgctcaacctgttcgaggggaaaagaaaccggcgcctcaaaacgccgagcgcggggtaacccgcacgtttgtattatccaacgcagggcatcccttgatgccgtgctccaatgccagggcgaggattctgattcggaaaggccgagccagggtttaccggcttttcccgttcacgattcagttgatcgacagggcatcaggcgacattcaacccgtcgctataaagcttgaccccggagcaaatacgactggtgtggccattgtacgcaaggacccaaacgattcgaccagacaaagcgtactacacctcgcggaaataacccaccgtggtaacgcgatccgcaaacacatgatcaaaagggcgatgttcaggcgtcgccggagaaatgctaatcttcgatatcgcgcaccgaggtttgataaccgaaccaagcgcgaagactggctgccgccgtcacttcaaagccgtgtcgacaatgtggcctcctggctcaaccggtacaggaaactcgcgcccatcacatcaatctacgttgagtcggtcaggttcgacatacaggccttggaaaacccctgcatcgaaggcttggaataccagcgtgggatgttgttcggagcggaactctgggaatacctgtttgagaaatgggggcgaaggtgcgcgtactgcgacgccgaaggcctggcgctggaggcggaacacatcgtgcccagggtttgcggcggatcgaatagggtcagcaacctgacgcttgcctgccgcaagtgcaaccaacagaaagggtcgcagtcgattcatgtgtttttagcagatgacccctcaagactggcgcgcatcttgagttacaccaaaaaaccgttatcgagcgccgcagcggtaaacgttacccgaaaatccattaaccgggtactgtacgggactggcctggaggttcagtgctcatcgggcggccgaacgaagttcaatcgcacccggcttggcattccaaagacccatgcgcttgacgccgcttgcgtcggggaactgtcaaaacttgagggttggaacgttcccattctctcgatcaaagccaccggacgcggaagctaccagcggactcgtcttgacagttttgggtttccacgaggctatctgacgcgccagaaggctgtgaagggttttcaaacgggtgacttggtaaaggcgacaatcccaaaaggaaaattcaacggcacacaccaaggccggctagcgataagggccagcggttattttgtaatccagagctcagcggggaacgtcggaaccaactggaaatactgcaaacatctcatgcgaaacgacggttacacctacgaaatcaaaccatctccggccacccaaactcttcctagactcgaaacattccagttattgagtcgaaaaacccgtaaacaagaacacgcacacaactcagtaaataacaaaaacaacaacacgttatggcaaatctga

SEQ ID NO: 855 - DNA, 257 bp, Unknown
  Ga0306922_10010477 JGI
gtcaacgaccgcccgctaaaagcaggcggcttgtgagctaatcgcaagcccatggttgaccagaacaagtgaaaactacgttgaacgacaagcaaaagactaaccctgggatgcttcctcagtcccaggctcttcgagttgccgctgcagacaagccagggtcagcgcgaaacgggcgacaacagacggcttgcgctcaacctgttcgaggggaaaagaaaccggcgcctcaaaacgccgagcgcggggtaacccgc

SEQ ID NO: 856 - DNA, 1077 bp, Unknown
  Ga0393278_0001403 JGI
atggttccagtattagacatgaagaaaattccgttaatgccttgtacagaaaaacgtgctaggaaacttatggagaagggagatgcaaaagcatattggaaaagtggcgtattttgtattattttacaaagagagccttcggcaagaaactatcaggaagttgtgattggaattgatccaggttcaaaaagaactgggatcaccactgcaacagaaaagaaagttatctgtaatcaactttttgatactccaagcggagtaaagaagaatgttgagacaagaagaatgtttagaagacacagacgttccagaaaaactccttataggaaatgtagaaacaatagaaggataggtggcgtgccaccatcaacaaaggcaagatggggagcccatcttaaaataatagatttttggaaaaaacttattcctctcactgttgtttctttggaggatattaaagcagaaactaaaataaattgtaggaagtggaataagaattttagtccattggaagttggaaagaaatggtttgagaatgaggttgtagttcgtggatataatttctataaatttccaggatttgaaacaaaagcacaaagagtttatagagaatttcataagacatcttcaaaactaagagatacttgggatgcccataatgttgattcacattgcctttgcgaattaacagtaggagatattaaaccatattatggaattcttaaatgtgaatttttcaaatggagtagaagacaaattcatgtttttaatcctgaaaaatataaagagcaagaaggcattcctaatcttaaaaaagatgggattagaaaacaatatggaacaacaagatctctaggactaaacagaggaacattggttaaacataaaaaattaggtttaacatatgttggaggaacatcaaatgagaaaatttctttacatgatgtgaaaactggaaaaagattaactcaacatgctaacaaagaagattgtaaagttttaactaatttaagatggaggacgcaaattcctcccatggctaaagccatgggtttcctttgcgtaaaaccaaaatga

SEQ ID NO: 857 - DNA, 238 bp, Unknown
  Ga0393278_0001403 JGI
gtcaataacccaaggctttagccttgggcttgtgaggaaaatcattcaccagaactaattcacaagggcaagaagagactagattagccaagggggaacaaaacccgataaaggcaactagggagatggtcatggtagacaacatagtatcttcaggatgttcagctagtcttgatgctctacttctcccagtatcgaagctgtagtttactaagaaggagtaatccaaatggttcca

SEQ ID NO: 858 - DNA, 1095 bp, Unknown
  Ga0272428_1004076 JGI
atgcgaattccagttgttgattcaaatcaaaaacaacttatgcccaccacaccagcaagagcgcgaaagtggattcaatctggcaaggcagttaaacgctggtcagattgtgggcagttttacgtgcaactcactgtagaaccatctggacgcgatactcaggatattgttatcggggttgaccctggcaagaagtattcagggattggcgttcagtctgtaagattcacgttgtacacagcacatttaattctcccttttcaaacggtaaaggacagaatggatgcacggcgactgatgcgacgtggacgtagaggaagaagaatcaaccgccagattgaattctcaaaacgcgctcatcgtcagaagcgctttgagaatcgtcgtcaagccaaacttccaccatctattcgtgccaatcgccagttagaactcaggatcgtgtctgaactctgtaaaatctatccggttacagaaatccgttacgagtacgtccgagctgatgtggatttaacgagtggacgcaagaaagcaagatccggcaaggggtttagcgctgtgatggttggtcagaagtggatgttacaacagttggagcagtttgcgcctgtcgttaaagttgaaggctatcaaacttctaaaactcgtgaacatctaggattgaccaagaacaaaacagagaaagcaaaagctgaatttgccactcatgcggtagacggcgtaagtattgcggcatcgcactttgttgaatatcggaaatatcacagagtaaacgttgatggagctaactggtttgggactgtttcgattacgactgcatcattctttgtgattcgtcgccctccatactcccgtcgtcaacttcatctcatggtgcctgccaagagtggagttaggcgtaagtatggtggctctacaactcgtcatggtgtgcgtaaaggcgatttagtcaactccccaaaaggaattggttatgtgtcaggagacaccgaaaaacagatatccgtcagcagcgatagctggaaacggctagggcagatatcggctaaaaaagtaactttagtccgtcgctctaatggattacttgtttcttag

SEQ ID NO: 859 - DNA, 223 bp, Unknown
  Ga0272428_1004076 JGI
ttcaccaacctcggcctcaaggcgcgaggattgtccgaaccaattcggacaacgtaagaggtgaatagcccattgagactcgatttggtacaaacttccaaacacttctctagttcggatttcctttaagcctgattggttcaggcgttgggtcaagccaagacatcttgatcgagttgggttaagagacttaaacgagtaattgggttataccaaaatgcga

SEQ ID NO: 860 - DNA, 1296 bp, Unknown
  Ga0315294_10016080 JGI
atgttagtatatattattaataaagatagcaaacctttaatgcctactagtcctaggaaagctagattgcttttgaaagaaggaaaagcaaaaatacataagtatgaaccatttactattcaacttatatatggtagttatggttatagacaatcagttacattaggcttagattcaggatctaagaatgtaggtttagcagcagtaactgaacaaggaaaagtattatatcttgctgaagtagaacttcggcaagatattaaagaaaatttagcaactagaagtatgatgagacgcgatagacgaaagagaaaaacaagatatcgaaaaccaagattcttaaatagaaaaaaagcgaaaggttggctaccacctagtattagatccagaatagaatctcacgtaaagctagttactgatgtgactaaaatactaccagtaaaaaatattgtagtagaagtaggattatttgatgttcaagctttaatgaatccaaatattgaaggaaaagaatatcagaatggtattcttaaaggatatgatagtgttaaagaatatataaaagttagagataaatatttatgtcactacaaagatttacgttctgatatactttgtagtaagaagttagaaatagatcatatgataccaacgagtaaaggaggtactgatagaccaacgaatttagtttgttcttgtgctgcacataatagaatcaaaagtaatatgagttatgaagaatttactagtaagcgtctacctaagatagaatcctttaaagaaaccgtttttatgaatgtagtaaagagtcacttagtttctttgctagcaaaacttagaccagtaagtataacttatggatatctgactactctgaagagaaaagaatttggattagaaaagaatcatacagatgatgctatcgctataacaaatatccggcctaaagaatatataggaaacagttatcagattaaacaagtacgtaagaagaagagatctttacatcaaatgactcctttctctagtaagaaaggaaatccgaattcgataagattaaaaaagaatactaaagtagttattgttagaaaacttaaatggtgtttgagagataaagttagagtaggtaatcaagtaggatttatatccggatttgcccttcctaactttgatgtagtagatattaacggaaatataataagattattaggaaggaagagtgatgaagtatcagctaaaaatactcagttgatatgtcgaaataataattggcaatgttgttttaatgttgcataa

SEQ ID NO: 861 - DNA, 266 bp, Unknown
  Ga0315294_10016080 JGI
gacgtagctgatacttatattgatgctaggatcgactcaacctcaaaagtgattttaggcgtcgattagtttaagtctacttcaataagtagactacgttaacaaagaaatgaagatacctacgaatgatgctctagttcgtagcaaactatcgtagctctgtaaacagttctcaagaggttagagaacagtcaactacatgtaaaagctttgttaacattaacgaagggcaaataacttctgaaaggaagatatactatatgtta

SEQ ID NO: 862 - DNA, 1119 bp, Unknown
  Ga0136617_10020436 JGI
atgtcaaaccacgtatttctcatagacagtaataagacaccgctcaatccagttcatccagcacaagctcgcaagttactggattccgggaaagccgctgtgtttcagtgttatccattcacgttgattttgaagcgagtcattgaaaatccaaatgtatatccgttaacactcaaaatagaccctggttcaaagtttactggcattgcgttagttacgaatcaaggcaatgttgtctgggcaatggagttgcagcatcgcggacaacaaattaaggaagctctcttgcatcgtagagcggtacgtagagggcgcaggaaccgcaatactcgttatcgccaagcacgattcctcaatcgtaaaagaccagatgggtggttagctccatctttaagacaccgcattttgacaatagaaacttgggtaaaacgactgcaaaagtttgcaccacttggttcaattgctcaagaacttgttaagttcgacacccaagcaatccagaatccagaaatctctgggattgaataccagcaaggaactttgaaaggttatgagtgccgtgagtacctgttggaaaaatggaatcgtcaatgcgcttattgtggtgtcaaggacgttccgctcgaaattgaacatatccaaccaaaatcacaaggtggttcagaccgtatttctaatctttgcttggcttgccacaagtgcaatcaacgcaaaggaaatagagatataaaggacttcctcaaaggtaagtcagatgtgttgaaccgcgttttgaaacaagccaaaacgaccctaaaggatgcggcatcagttaactcaagtcggtgggcattgttcaatactttgaagtcttttggattgcctgtgagcatcggcactggtggtcaaacaaagttcaatcggattcgattttcgtggccaaaagctcattggattgatgcggcttgcgttcccgcgtgtcaatgccatcaaacttgttacaaccaagattctcaaggtaaaagcaacaggttttggtggtcggcagcgatgtcaaacagacaagtttggctatccgcaaaaacatcgcccgttgcgtccaattctgggattctgtacaggcgatatagttcgcgctaa

SEQ ID NO: 863 - DNA, 249 bp, Unknown
  Ga0136617_10020436 JGI
cggtaaaacctacccagagttggacatttattgacaactctaccgaacgtgcagactaagcgaaagctacgatttttgagtcatgacaccaacgaatgaacgccagtttgttgctctgtcgattgtcatgtttggcacggattaacggttgattaatccgcgtgtggcagtccaaacaagctcttaaatcattgtcgaggcaaactttacttagcaataaagttgattgaataaatcatgtcaaaccac

SEQ ID NO: 864 - DNA, 1026 bp, Unknown
  Ga0376462_0006212 JGI
atggaccgaaaggtcactacttcggtagtagaaaggaaaaatattatggtaatagctctagataagagaaaaaaaccattaggttttataactccaaaaagagcaagaaagctcttagaatctaatagagcagtagttcacagaatgtatccatttattataaggattaaagatgtggatactagagactgcgatacaaaagaatttagattaaaaattgacccaggtagtaaatatacagggctttcaattatagatgacttaggtaatgtatatttcttggctgaacttgaacatagaggctctgttgtaaaagataagcttaaaactagagcaggtgctagaagaaatagaagaagcagagaaactagatatagaagacctaagtttggtaacaaaataggtaagaaaaatgcacaaattaaatatgactcagctagagaggaaggttggttgcctcctagcatacaaagcatagaggataacataattaatttcattaaaaagtactctaaatggattaatattacttctataagtgttgaaggagttaactttgatacccaaaaattagataatgacaaaattaaaggtgttgagtatcaacagggtacactttttggctatgaggtcaaagaatatttattagataaatatgggcgtaattgccaatattgttatgattcaacagagagacgcaatttgtcaggtgataacatattagaaatagaacatatgatatcagtcaaaaatggtggttcaaactctgttaaaaacttgactctagcttgcagtaaatgtaatcaaaagaaaggtagtcaaaacctagaagattggtttaaagttcttgaaaaatcaaaaaccaaacttgataaaaagagagctgaaaatatagcaaaaattcttaaagatgggaagccttttagaggttatagatatgcatcatggtctaatagctataaaaacaagctaattaaggatattaaaaatttagaaaacataaaatctgttgaaatgtcatacgga

SEQ ID NO: 865 - DNA, 325 bp, Unknown
  Ga0376462_0006212 JGI
gtcaatgaaccctcggctgaagccgaaggcatgtaatcgcaaggttgcataaattcggttttcggttgaattgagcagactttcgttatcttagttatgatggactggtgtgcttctccagcacctatttcatcgccgaaatctaaacagggcttcgagggaacttttacagcattgctgtaaaagcaaacccagtgattaggttaaccaattcgagagttattaaaaaagctgagataacattgtcgaggagagataaccttcgggttacgtaactatggaccgaaaggtcactacttcggtagtagaaaggaaaaatattatg

SEQ ID NO: 866 - DNA, 1083 bp, Spirochaetales bacterium UBA4673
atggtttatgttcataattgttttggcttaccgctcatgccatgcactgaggcgaaagctaaacatctgttaaaagcacataaagccaaagttgtgaatcttacaccgttcacaatacgccttaacttcgtcgttgacgatattactcagcctgtaaccctcggtgtagacgcaggctacaaaactataggattatctgcatccactgaggataaagtactctttgaaggagaggtaaaacttcgtgaggatataatagcccttctcgaaggaagacgagcgagaaaaacccgatatcgtgctcctcgttttgataacagagttcgctctaaaaacagagggtggtttgcgccttctgtagaaaatcgtatcggaacgcacttaagtgttattgctaaagtttgccgtctcgtccctgtttctagacagaaaggagagcaactaggtttttggaatgttagagagtatgtactatggcgagacggccataagtgcagaagttgctttggtaaaactaaagacacagttctcgaagtacaccacctagtacaacgtaaagacggtggttcagatagaccggataatctaataacactttgtaagacgtgccatgaagcttatcacagaggagagattaaactagataagccgaaaaaaggattcaaaggcgcaacgttcatgggaactatgagaaaggcacttattaagcgtctaagagagctttatggctcggggatggtagaagtaacttatggttatattaccaaaaacactcgtattgagaatgaccttgataaagctcactacatagacgctagatgtatagcgagccaccctaaagccactcctactaagactatctacagtttacttaagcatcgctctcataacagacagatacatagacttacaatccttaagagtggcgtaaggaaaaataatcaatgtccaagaaagatttcggctttaggctctttgacactgttcaatacaacagagaaatatgctctgtgcagggaagacgtactagtggaagttttagcattcgaaaaccgaatggtgagaaggtttctgaaggcgtga

SEQ ID NO: 867 - DNA, 362 bp, Spirochaetales bacterium UBA4673
taatgagtgaggatatcaacaacccacggtgcaagcactggggtatgaggagtgaaaacgactcatgctcttgttgattagcctaagtgctctatgcactactttattagagaatatataggtactgttggatgtcgtcctagtctgacactctacggttcgtgtttaaagagtctcaaggggtagagacagtgatacgaacttcaaacctctaataacattggcgaaggacaccggagagtaagactccgttaccgaagaagacgcgggccttaatgtcgtattgtcttcctctctattctcattcacggcatgagtattagagagtcttaagccgcatcacccataggaggacagtcatg

SEQ ID NO: 868 - DNA, 756 bp, Human gut metagenome
atgatttacgtaagaagtaaagaaggcatggtattaatgccaacagaacgttgtggtaagataggttatcttcttcgtcacggaaaggctcacgtagtcagccgtgttccatttgttgtacagttggattacgatagtaccacctacacgcaagatgtgagtcttggcattgatgctggctcaaagcacattggcgtttcggcaagttccgagaagaaggagatgcttgcagcacaagtcgagttaagaagtgatattgtgaaattactttctactcgtagggagttgagacggaatagaagaaaccgcaagacacgctaccgcaaggctcgttttgataatcgcaagaagaaagatggttggctagcaccaagtgttgaacaaaagattgagagccacttgaaggttattcgtttggttcataaactacttcctgtcacgaagaccacaatcgaggtcgctcagtttgatgctcagaaaatcaaaaacccagacataaagggtgatgaatatcagcaaggcgaacagatgggattttggaacgtaagggagtacgttttggcaagggatgggcataaatgtgttcactgcaaaggcaagagcaaagacccaattttgaacgttcaccatttggagagccgcaagacaggcggcaattctcctagcaatctcgtaacgctttgcgagacctgccataaagcttatcatcgtggagagttcgatttgaaaattaagcgaggaagttccttgcgtgat

SEQ ID NO: 869 - DNA, 277 bp, Human gut metagenome
tttaagttttggaatcctttaattaggttacagcgattatccattcaatcgtccgaagcggattagccttagccccgaatggaattagggagctacgttaggaatgaatgcataggcacgtcagaatgttcgtccaagttctgacctctgcggtcgatgattaaaagaagcgaaaacaacggtgttgtcggcaagaaaccattctataacatttgcgatgggcgcacaaccccacttcggtgggagatttatttattaatttaaatttgagtttatg

SEQ ID NO: 870 - DNA, 1277 bp, Ktedonobacterales sp.
atgttcgtgtatgttttgaattgtcatgggaaaccacttatgccctgtcagccacacaaggcacggctgctcttgaagcagggcaaggcaaacattgtacggatggaacccttcaccattcaattgcgccatggcagttccgggtacaaacaagagatatcactcggcattgatgccggaagcagacacatcggagtggcagcaacgacagagcagaccgttctctttgaagcggaggcaaagcctcgcacggatatccagcaactgttggcgacacgtcagcaatttcgccgagccagaaggagccgcaagacccgctaccgaccatccagatttcgcaatagaaagaagccagatggctggcttgctccctcagtccaacaccggctcgatgcccatctcaaactcatcaagatggttcataagctcttgccagtgaaccaaacgacgattgaggtggctcagttcgatatccagaagatccagcatcctgagattgagggcatacactaccagcaagggccacaactgggcttctggaatgtgcgtgagtacgtgctctggcgcgattcccaccggtgccagtggtgccagggcacgtcgcaagatgcagtactcaatgtgcatcacatcgagagtcgaaagacgggtggggatcgtccagagaacctgattaccttgtgtgagacctgtcacgatctcattcaccggaggcaccaagagcacaagatcaccaggaagagcaacgggtttcgggatgcaacccagatgggcatcattgggggaagatctatgagcaggcacgtgctcagtttcccaacgtccatctgacatatgggtacatcaccaagcagtcccggattgaacacaaattggagaaatctcatctcgtggatgcccgctgcatcagtaggaaccccctggcttgctccgatggcacctcttacctgatgaagttcgttcggcgcaataaccgccaactgcacaaagccaccatcagaaaagggggcaacaggcagcgcaataccgctgccaagttggtccatggttttcgactttttgactgcgtgagctatcaagggacagtctgctttgtgtttgggcgcagaagttcgggctactttgatttgcggtccctggatgggaagaagatccatgccagcgccagtcacaaacagttgaaacgagtccagagggcttctgcctgtttaatcgaaaggaggagcggcattcttccctcccctcaaggggcgggtctcctgccgctgaaatcatga

SEQ ID NO: 871 - DNA, 238 bp, Ktedonobacterales sp.
gtcaatgacccccggagagatcgccggaggcttgtaagagccttcattgactagcctgagtcctttactggactacgttcgagcggtcacgatacctccaggtgtctacgctagcctggagccctatcgcctgtgattaaaagttctgatgggtaggaacggtgttgcagaccgaacaagccgcttgaacattggcgaagcgtaccatacatctgaaaggatgatgcacgttatgttc

SEQ ID NO: 872 - DNA, 1362 bp, Unknown
  Ga0180433_10023929 JGI
atgcagaagttatcacaaagaaatacatgcacaccaacagatgctcaaccagtctgttgcaactgtgattctgaattaaacagagaagaaattctcagtgatcagaatttaaaaacttgtgataacagctccgaggttgatcaagctcaacatacagagcggtcattacaaccaaaagtgtatgtgcttaattgtcggggaaaaccactaatgccttgcagttatgctaagtctaaaagaatggttagaaaaggtgcagcaaaagtcattaaaagatctccttttacaattcaattaaattttgattgtgaaaacaaagttcaagatgtaacattaggaattgatacaggttattccaatattggattttcagcagtatcagaaaaagacgaactgatatcaggagaagttatattagaaaatgggatgactaaacgtattcaagacaaagctatgtaccgaaggaatagaagaaatagattgtggtacagagaaccaagatggaaaaatagatcagctaataaaaaagaaggttggttacctccttctactttgagaagatttaaaactcatatttctttaattaaaaagattaaaaaattattaccgatttctaaaattagaattgaaatcgcaaatttcgatattcagaaaattgaaaatcctgacattgagggaacaggatatcaacagggctcaatgtatcaatatagaaatcgcatagcttatttaatcactagggaaaaaggaaaatgtcagtattgtgataaagaatataaaaaaggtgacgggtggcgactacatcatatttgggggaaattaaaaaatagaccacaagattgggctttagttcatgaatcatgtcataagaaattacacgcaaaacatgaagaatatgtattacaacaaaagaaatcaaattcatacaaagattctacgtttatgaatattattagaaaaagatttataggtttgtttgaaattacatatggaaatataacttttcaaaatagatgtgatttagatttagaaaaatctcatgttaatgatgcttttgttatagctggaggagctaatcaaaaaagatgttcacaatttaaaatagagcagaaaagaaaaaataacaggtgtcttcaacttaacagaaaaggatttaaaccttctattagacgacaacgttattctttacaaccaaaagatttagttaagattaatggagaaatatatgaagttaaaggaattcacagttatggtgcccaggttaaattaaaaaatagttttggaaatataattaacaagtcagttaaaaaattagatgaatggaaatttcatcaaaaaactttaatatggaggacagtctga

SEQ ID NO: 873 - DNA, 256 bp, Unknown
  Ga0180433_10023929 JGI
gtcaactaccaaaggctaaagcctttggcttgaatggtaacattcaacgcaagagttgattaggaggcataaaaattatgcagaagttatcacaaagaaatacatgcacaccaacagatgctcaaccagtctgttgcaactgtgattctgaattaaacagagaagaaattctcagtgatcagaatttaaaaacttgtgataacagctccgaggttgatcaagctcaacatacagagcggtcattacaaccaaaagt

SEQ ID NO: 874 - DNA, 852 bp, Unknown
  GENOME_ACESSION: mgm4784220.3 MG-RAST
ttgaggcttgacatcattcctctgattctacatgattgcataggttatttctgcgagactcctaagctccgtgcccatcgccaaaaacgcttttctaatcgcaatcaaaaaaaggttgcgccatctattaaagcctcgcggttgatggaaattcgcattgttaaagagcttgcctctatatttcctgtcagttcaattgtttatgaagtcgtcaaggctgatgtagacaagacatcaggtagaaaaggcgctaagtctggtaaaggtttctctcccgttatggtcggtcagtattgggcaattgctcagcttgaggcgattgcgcccgtcgtaaaacgtcaaggctggcaaaaagacggtaatggaacaagccagatcagaactcacttaggactgattaaagacaagcaaaataaagctaaagcaagtcctgaaactcatgcagtagatggtattgcgttagctgccagccagttcactcagtatcggattactcacaagtttggcgaagattctggcgactggatgggtgctgtagagattacgcccgcaccgtttcacgtcataactcgacctgagtacttccgtcgtgccttgcacttcgacaatgccgacaagggcgggaagcgaaagcgcaaaggcggtactgtgaatccgtttggatacagagcaggtgacaaagtaaaggtcaagaccaaaggcgaagtcattacgggctgggtgggaggtttcaccgataccgaaaagtcgaaaaaggttagcgtttacgaccaaaactggcatcgccttgggcagtttggcatcaagcaaatcaaattaattcggaggtctaacaagctatgtgtagcttga

SEQ ID NO: 875 - DNA, 294 bp, Unknown
  GENOME_ACESSION: mgm4784220.3 MG-RAST
gcaaactatatccctgttctctcagcaagctataaaccgtccggggactgacctgatgccccatctcttgcagcgtggcggcgagttgatgcgtactctgggttgtccatctcagcgacgactccggatcgcctcgggtacccggttcaattaaggttgccaaatcttctaaaagcgtggtatctgtggtggtcaaacgtttccgtcccccgccaggtctgcgaactgcacccagttccagcccttcatcatcggcttgactcctttgctctagctcttgcattccccatcgca

SEQ ID NO: 876 - DNA, 1242 bp, Human gut metagenome
atgcgaggagaaccgctgatgccgtgctcaccggcaaaggcccggattttgctcaagcaaaagaaggcggttgttcggcgcagaactccgtttacgattcaactcaccatcgctacgggtgaaaccaaacaacctgtgactcttggtgttgactgcggctacaagcacgtcggcctatcagcgagcaccgacaaagatgaggtgtacgcctcgaaagtcgagttgcgcactgacatcgttgatctgctctccaccaagcgtgaactgcgtcgttcacgacgcaaccgcaagacacgctatcgtgccccaaggtttgacaaccgggtccatagcaaaaacaaaggttggcttgctccttcggttgaaaaccggattcaagcacacctgtcacgagtggagtcggtttgcgatcttgtgccggtcacgaaaatcattgtgcaaacagcggcctttgatattcagaaaatcaaaaatccggatattgaaggcgttggttaccagcagggagatcaactgggtttctggaacgtgcgcgagtacgtgctctggcgtgacggacacgtctgccaacactgcaagggcaagtccaaggatccggtgctcaacgtgcaccatctggaaagcagaaagaccggaggtgacgctcccaacaacctgattacgctctgcgaggcctgccacaaggcattgcatcgcggggaaatcacgctcaaggcaaagcgcggaaagtccttccgtgcagagaccttcatgggagtgatgcgttgggcgtttttcaatcgcctcaaagcaacctatccgcagcttgaagtgagaaatacctacggttatctcaccaaacacaagcgcattcatcatggcatcgccaagacgcattgcgcggacgccttctgcatcgcaggcaacctcacggcaaaacgtgccggaagttatttctttcagaagcaaacccgcaaacacaaccgacagattcacaaactgacggttttgaagggcggtgttcgcaaaaagaaccaatccccctacgaggtcaaaggtttccggttgtttgacaaggtgatctgcaaaggcgaagaggcttttatcttcggccgcagagcgacgggcaggtttgatgtccgccgtctggacggcactcgcatttctgcgggaatcagttgcaaaaagctcagactggttgaaccgcgcagaacttttttaacccaacttgtaaaggaggaaggcgattcctcccctgcttga

SEQ ID NO: 877 - DNA, 249 bp, Human gut metagenome
gtcaacgaccccggcctgaaggccgaggcttgaataaagcctgagttgactagcctcagtttccgaaaacggaaactacgttggttgggaatacataggcaccgtgggatgtcaatcctagtcccacgctctgcggtctgtcgttaaaagctctgcgaggtaggagcggtgcggcagatagacaaaaccccttccaacattggcgaaggattacaaccggccttcgggccgaggagataaaacttgaga

SEQ ID NO: 878 - DNA, 1239 bp, Unknown
  Ga0376486_000912 JGI
atgttagtatatgtattacatcaagatggaacaccattaatgccttgtaaaccagtaatagcaagattattgctgaaaagtggtaaagcaagagtggttagaagaacgccattcacaattaaattaacgtatgataccactaaaaatactcaagaactaacattgggtattgatagtggatctaaaactattggcagtgcagtaagagatgatcaaaatagagtatactatttatcagaagttacagttcgtcaagatgttaaagatcatatggaacaacgtagaatgtatagaagaaatagacgaaacaggaaaacaaggtatcgcaaacctcgttttttaaatcgtaaaaactctattcaagacaatcgttattcgcctactttaatatctaaatatagtagtctaataaaagagttatggtttatatataaaatattaccaataaccaatcttattattgaaatgggaacctttgatccacatgctatgcatagaccagaggttatgtggcatccatggttatatcaaaaaggattacaatttggtttcaataatatcaaggcatatgtattatcaagagatcaatatacatgtcaatattgtaagaataagaataaagatccacatttagaaatacatcatattgtatataaatcacaaggtggttctgatagaccagacaatttacttactctttgtaagacttgtcatgaaaaattgcataagaatcaaattaaacttactaatagtaagttaagatcaacatttaaacatgcgacacagatgaatgtattgcaaagtatgattagaaaatatataccagattatacagaaacatatggatatatcactaagacaattagacaatattttagtctagaaaaagctcattgtatagatgctgtatgcgtagaagctactagtgatatacaaccagagtttcttacagatcgtgttattttcaagaaatgtattagtaaaggtaattatcaattaactaaaggcaaacattctgaaaagaagatgcctaaagctaaaattcaaggatttaaaagatgggatactgtattatataataacaccgtctgttttatcaaaggtagaatgagtactggatatgctgtattatgtgatattcttggtaataagtatagttttaaacctattccaaaatttaataaaatgaaacggatatcagctagaaagtcatggattatgatagagggaatcatgtaa

SEQ ID NO: 879 - DNA, 289 bp, Unknown
  Ga0376486_000912 JGI
gtgaactccccacccgctaaagacgggtgagcttcaatattttgaagctctggttcaccagactcaatatctagaaatagatactacgttatcttggatgtagataccttggattgccgcctcagatccttgctctatcgtggcactgtaaacatcgctgaagggaaggcgaagtcaaccacacctcgaagcctagataacattgtcgagaggatgtcggattctttatatggtaacagtatagagatacgcataaccctattaaattaggagattaattatcatgtta

SEQ ID NO: 880 - DNA, 1548 bp, Human gut metagenome
atggcatcttacgaaaggaggcatccaatgccggagtatatctatgtgttaggcagggacgggagtccgcagatgccgacaacacgaaggagacatgtgcagaagttactggataccggcaaagcacgcatcgccgaacatgtcccttttaccatacagttactttatgacaatacccccgtcctccagcccgttacatttgcagaagatccggggcggacgaatatcgggatggcagccctgtccctgaaaggggaattactgttttctgccgtctgcgagacgagaaataaggagatcgcaaaactgatggaggaccgcaggaagtaccgccgtgcctccaggtctggagaacggaaggcaagacagcggctggcgatacggtttggcacggtcttaaaagccgggatgatgatgcggaagctgccaaagtatgcagcagacaagttcatcacctgtaaggtcatccggaacacggaatcccggttctgcaaccggaaacgggacgaagggtggttgaccccatcggtcaaccatctggtggatacgcacatccatctgctccataagatgcagaagtttctgcccatcaccgatgtggcactggaagtcaaccggtttgctttcctgcttctggaagatccgtccatctctggtgtggacttccagaacggaccattgaaaggattcgataaccgggatgccgcagtctatgacctgcaggatggaaaatgtctgctctgtagaaaagagattgagcattaccatcatatcgtccccaaaagcaggggcggttccaacacccttggaaacattgccggactatgtaaaagctgtcatgacagggtacacaaagacaccatgtatgccaaacgactggaagacctgaaaaagggactggacaaaaagtatggtgccctgagtgtcctgaaccaggcggtcccgttcctctgccagaagctggtacaggagtttggaaaagatcatgtcttttactgtaccggcagggatacggcaagagtacgtaccgccctgggctaccagaagacaaaggaaaaccagctccacgaagtggatgcctggtgtattggacttctggcattggaaaaagttccagaaaagctgccagacttccatccccaccggatcctccagttccggagacaggacagaagtttgatcgatgcacaggtggaacggacatacaaactggacggaaaaaccgttgcaaagaaccggaagaaacggacggaacagaagaccgattccctggaagaatggtttgaaaaacaggtaaaatctttcgggaagaaggaagccaaacgaaagagaagccggctaacggtggtaaaagcgtatcgccggtacaacgatccggaccgtctgatgccaggtgctgttttcctgtaccagggagtccggtacgtcatgcgtggacggcactgcaaaggggcctacctgcaggctgtcggtatgggaagtaaagatttcccagtaaagcaatgtaagatcttaaaacaaaataccgggttagtctttgttgcttga

SEQ ID NO: 881 - DNA, 269 bp, Human gut metagenome
gtcaatcacccacgactaaagtcgcgggcttgcaatagcaggtctgtgctttagccgctgggaatttgagcggagacgtgatgtctgtgttcccgtaagggatggcactccgggatgtttttccagtcccgtgaccctgcagagcagacaccaagtctaggaagactgttttacagccatgcacaggcttaccaccggtgcggggatcccgctgatccccgtgggactgcatggcatcttacgaaaggaggcatccaatgccggagtat

SEQ ID NO: 882 - DNA, 1335 bp, Unknown
  Ga0114934_10005458 JGI
atgaaagatgtaaaaaacagagtcctggtagttgatactaactatcagcccatgactccagtacacccagcggtagctaggaagctaatcaaacaccgtaaagcggctatcttccgtagacagcccttcaccatagtcatgcgttccgagagtaccgagaaacctaaagaacatacccttaagatagaccctggctctaaacaaacaggtctagctgtagtagatactacaactaacacagtagtatgggctgcaactctggtacaccgaggacaggcgattaaagcccgactcatctccagatctcaaataaggagcactcgtagatctcgtaagtgcaggtatcgtaaacccaggttcgataacagagcaaaaccaaaaggatggctaccgccgtctctaatgtcccgaatccataacactatgacatgggtcaacagactacgtaagttctgcaacataacagaactgtcagcagaacgtgttaagttcgatatggccttaatgaaggaccctaccatacaaggcagtggatatcaacaaggagatctctacagaaccaatctatgggagtacctactggagagagaccatcgtgcctgccagtactgtggtgccaagaatgtaccactagaacgtgatcacatacaacctaagtctaaaggaggactagatgtcaaagaaaacctagtactagcatgtaaactatgcaaccaagctaagaacaacacagatgttagggtcttccttaagaacagaccaatgactcttaagaaagtcttaaatcgtaagtcggtaaggttatcagatgcagctgctgttaatgccacacgtaacaaactcttacgggaacttctgaatacaggacttccagtagagacaggaacaggagcacaaactaagcttaatagggtcagtcagggctatcctaaagatcactggatagatgctgcttgtgtaggtgactctgggagagttgttactcttaatagctccatggcaccattagttataaaagccatgggtcacggtaaccgtcaggtaactcatactgacaaatacggcttccctaatagtaaacctaggagcactaagaggctcctctctccagtaggttatgtcaagactggcgatatagtacaactagacgttactactggtaagtatcaaggtatgtctaaggatatgtccagagataggatatcgagtatcaatacaattaaaaacttcttatccatcatagtagacggacggtcaagggcgttcccagttaggcatgtcactcatctactccatcttcatgatggatactcatataaccacaggagtctgtag

SEQ ID NO: 883 - DNA, 279 bp, Unknown
  Ga0114934_10005458 JGI
tatacagtaagtaatatagtcatgttgagtagctagctcacttattagataagtgtggtcctataggactaactcaaccagctcgctcctaagggagcagacgatatggataagatcatacctaggggtgctccgccagctcctagctatatggtgtgcgtgaatgacctataggctagcactatagtaatcaggtacacatataaccttcatgtctgagcgaggctaacagtactttacagtacacaacccgaaaggagttaacaatgaaagatgtaa

SEQ ID NO: 884 - DNA, 1605 bp, Unknown
  Ga0377182_011632 JGI
ttgagattagcaaccaaagagagaactacgttgtacacagagttaaagaccaacgccggggtgcttcctcagctccggcctcttgaagcgcaggcagcagacaagccgcagggttcggcacgaaacgggtctgtgcgtgatgccggtgtgcaacatgcccgaggggagagttcaggaaacgccaagcctgaaccgtcacccgcgcaagcggagcgcggcgtaagccgtgtatttgtattgggtaagaaccatcaacctttaatgccctgtcatccggcacgggctaggaagctgcttcgacagggacgggccgtggttgtgaaacgctttccgttcacaatccggcttaaagacaggattggaggggaaacccagccgatcagagtaaagattgaccccggatcaaagactactgggttggctgttgtcctggaacagggtgaaacgcaacacgttgtgcacctgagcgaactaacccaccgaggctggaaagttcagaagagcatggggcagcgtgcagcgtttcgccgtggaagacgaagcaggaatcttcgttaccgccagccgcggttcaacaaccgaaccaggcctaaaggctggttgccgccaagcctgcaaagccgcgttgacaatatcttgtcttgggtcaacaggattcgtcggctctgccctgtgtcttcgaccacagtagagcgtgtccgattcgacatgcagctcatggagaatccgaatatttcaggcgttaagtatcaacaaggaacgctctttggttacgaactcagggagtacattcttgagaagttcaatcgttcctgtgtgtattgcaacggtctgtcaaaagacccaatcctagaggtagaacatattgtgccgcgaaaccccaaacatggggagcgcggctctaatcgggtttccaatctgaccttggcctgtcgcacctgcaacaaatcaaaggggaattgtcagcccgaagagtggctaaaaattttgtccaaatcccgaaagagaatcgacaagcaacgacacaagggcttgctccaggttctggaaggcaaacggcccactctggcacatgctgctgctgtgaacgcgactcgcaatagattgttttttgatctgctcaacacaggtcttcctgtcgaggccagcacaggaggccaaacaaaagtcaaccgccattggttgcaaattcccaaagcacattgtcttgatgcagcttgtaccggtcaagtttcaacactttatggatggaaccagcctgtgctcttgatctgggctatgggccggggaagctacaagcgaacccgtttaacaaaacatggatttcctcgtggattcctgatgcgccagaaagccgctcacggctttcaaaccggcgatatggtcaaagccgttgtgccaaaaggaaagaagcgtggaacttatgttggtcgggttgctgttcgtgcttccggtagttttaatattaaaaccgagactcagaccgttcagggaataccgtggaagcattgccgtcttctcgctaaggcggatggctacggttatgccgtaacctcgcttcctcctctacctgaaggaaggcgtctccgcgaggaagaaggatga

SEQ ID NO: 885 - DNA, 320 bp, Unknown
  Ga0311301_10001791 JGI
gtcacgtaccctatcgccttttgaaacttcatcatgcgatgggcttgtgaagaacgaagtcctggacgtgaccagcccaccaggctcgtcctggtaaccgtttcccatgaatgcataggcactccgcgatgccgatccagtcgcggacgcagcggtcaacgattaaacagacagacagggttcgagtcagtgtcgttggcaaccgaaggaaaccacgggaaaacaggggcgaggataccctcacttcatccggctacggatgaacgacgtctcattacgagacccccgcaaggggatgaaaggaacgaaccatgtcgcgc

SEQ ID NO: 886 - DNA, 1311 bp, Unknown
  Ga0311301_10001791 JGI
atgtcgcgcgtgttggtgctcgaccagcagaggcggccattgatgccctgcactccggctcgcgcacgcctgctgctcaagcaacacaaggcagcagtctggcgccgttacccgtttacgctgatcctgcgggtcgcccgtccagatgccattgcacagccgttgcgcctcaagatcgacccaggcagccgaaccagcggcctggcgctgacaaatgatgcgacgggagaagtggtatgggcggcagaactcacccatcgcggcgagcaggtccacaaagccctccagaaacgggcagccgtgcgcagggggcgacgccagcggcatacgcgataccgcaagccgcgctttctcaatcgccgacggcccaagggctggcttcccccgtcgcttctcagccgggtgcgcaacatcgagacctgggtcgcccgcttgatgcgctggtgcccactcggggcgctttcgtacgaggtggtgcgcttcgatacccaggccttgcagaatcccgaaattgcaggaactgcctaccaacacggcacactggcgggttatgaagtcaaagagtacctgctgctcaagtggggacaccgctgcgcgtactgcaagcaaacgggcatagccctgcaggtcgagcacctcgtgcccaaggcgcgcgggggcagtaaccgcgtgagcaacctgacgttagcttgcgaacgctgcaaccggaagaagggcaaccgcacttcggaggaattcggctttcctcatctccaggcccaggccgggctccctctcagagacgccgcggccgtcaatagcatcaggtgggcgctgtacgaacgcctcaagtgcagcgggcttcgcatcgagacgagcacgggtgggcgcaccaagtggaaccgcacgcaacgcgacatccccaaagcacactggctggacgcggccaacgtcggtcaatcgactcctccgcgactgctctggcagcacgtgcgaccgctgctcatccgggcaatgggacagcagagccgtcagatgtgccgcatggatgcgcaaggcttcccacgcacaaaggccaagaaaccgagcgcgaaacacgcgtttcggacaggcgatatcgtgcgagcagtcgtcccggcgcacctgaagaacaagggggtgcatgtggggcgcatggcagccagagccaatggtgccttcacgattgccacgcggcgtgggacagtcaccgacattggctatcgctactgcacccgcctgcagcgcaatgacggctacggctatctgactcagagcataagggagtgcagcttcccctcggtcttccaatga

SEQ ID NO: 887 - DNA, 320 bp, Unknown; identical to SEQ ID NO: 885
  Ga0311301_10001791 JGI

SEQ ID NO: 888 - DNA, 798 bp, Unknown
  BBAY79_10002962 JGI
atgtcaaactttgtattcgtaatagataccaacaaaaagccactagaaccctgctctcctaccatagctaaaaagctactgaaggcaggaaaagctgcggtttttaggcaatatcctttcactatcattcttaagaaggttgtagagccaggagaaatcaaatcatgcaaacttaaattagacccaggctcaaaaacaactggtatagctattctgcaagaagataaacttatctgggcagcagagttaactcatcgaggtcaaaagattaaagacgatcttgaatctcgtagatcactaagacgtggacgcagaggtagaaaaactcgttatcgtcagcctagatttctgaatcgaaagaaagagaaagcttggttagcaccaagcttggagcatcgggttctgactactatgacctgggttaagagattaatcaaatattgtccaattgattctatagctcaagagttagtcagatttgatacccaaaaaatgactgaacctgaaatcagtggcaaagaatatcagcaaggcactctttaccaatacgaggttagagaatatcttctagagaaattcaatcgtacctgtgcttattgcggagtcaaagatactcccttagaagttgagcatatcaaagctaaatccaaaggtggctctaatcgagtatctaatctggcaatagcttgtgtaccttgtaatcaagctaaatctaatcttgatattaaagattttctggctggcaaaccatctgtactcaagcgaatattagcccaagctaaagcacctttgaaagat

SEQ ID NO: 889 - DNA, 268 bp, Unknown
  BBAY79_10002962 JGI
gtcaggaatctcgtagatagcgactccgctttaaaaagacggagcttgaaaatctagtacctgaccagttcaagtccttcgaggactacgttaagagcaagagttaaagacctaccttggagtgcgtgccagccccaagctctagaaccgaaaagttaaacagatgtatcgagattaaatcagtgctttttggatagttaccgactcttaacatggacgaggcaaacataatcctttactggagaaagacgcaaaaatgtcaaacttt

SEQ ID NO: 890 - DNA, 1365 bp, Candidatus Diapherotrites sp.
atggaaacaaaaatgcagaagttaggaaagagaaatacatacatacctactgatacttctctagtcggtagctctatggtcttgtctttaaacagagaggaaattcttagtgagcaagacttaaaaaccttttctaacaactccgaagagaaccattcccaacatacagggaatcagaacttgagagtatctgatattgtgtatgtgcaaaacatcaaggggcaacctttgatgccttgcaaacaacaaaaagcaaacaaattactaaaacaaggaaaagcaatagttatcaaaagaaaaccattcactatacaactaactattgcaacaggagaaaccacgcaaccaatcactctcggcatagatgcaggaagtaaagtgattggtttctcagcgataactgagacacaagaattggtgagtggtgaattagaactaagacaaaatgtgagtgaaaaactaatagagcgagcaatgtatagaagaggaagacgtaacaagttatggtatcgagaaccaagattcaacaaccgaaaacgagaagaaggttggctagcaccaagtatacaacataaacttgacacacaccaaacattaattaacaaaataacaaagttgttacctattaacaacatagtcgtggaagttgcaaagtttgacacacagaaactacaaaatgcagacatagaaggagccgagtatcaacaaggtcaaatgagcggttataataaccttagagcattcatatttacaagagataaatacacttgtcaaatatgcaaagagcaaggaggaatacttgaaacacaccatattattcagagaaaagatggtggtagtaatagacccgataacttagttacattacatttaaagtgccacaaagattttcactcaggaaaaatcaaacacaaatttactaaaccaaaaagtttcaaagacacaagcgttatgaacaatgtttggacaagattagttgataaaaacaattacgaacacacgtttggttacataacaaaagaaaacagacaaaaacttgaattagaaaaatcacacgtaaacgacgcattcatcatagctggtggaagtaatcaaacaagatgtataatcagtaatttgaagcaaataagaagaaacaatcgttgcctgcaacttaacaggaaagggtttaaaccaagtattagaaggcagagatacaaaatacaatcaaatgatttagttaaatttgacaacaaaatttatacatctaaaggtgtgtttaacaaaggaacttgggttaaattaacagatgatttaggaaatacaattaacaaaaatattaaatgtgtagaggtaacaaaatatggaaaaggattacaaatatga

SEQ ID NO: 891 - DNA, 272 bp, Candidatus Diapherotrites sp.
gtcaatcacccctccctgaaggaaggggcttgagccgtgaggtttgagagcaattggttgattaggaggcaaagatggaaacaaaaatgcagaagttaggaaagagaaatacatacatacctactgatacttctctagtcggtagctctatggtcttgtctttaaacagagaggaaattcttagtgagcaagacttaaaaaccttttctaacaactccgaagagaaccattcccaacatacagggaatcagaacttgagagtatctgatatt

SEQ ID NO: 892 - DNA, 1137 bp, Nocardiopsis sp. CNR-923
atggctacgttccgcacaggacgaaaggcccaccctggcgtgcttcctcagcgccaggccctggaatccgcgccagctgacactccccggatcgggaacgaaacagggcacggagaccaccggcaggtggtacccggtgcggaacatggtcgaggggagaccggtaccgcctcacctggcggttccggtgtcacccccgagccctgcggggccgcggagaagggccgtgaggcccacaccacccacccctacgtgttcgtcctcgacaaacacggcacacccctgcagccctgcccgcccgcacgggcccgcatcctcctggcgaagggccgggcggccgtccaccggcacacccccttcaccatccgactcaaggaccgcaccgccgccgactcccagatcgacggcgtcgagatcggtgtcgaccccggctccaagaacaccggcatcgccgtgttcacggaagaagccgggcagcgccggggccggtacagcatccagctcgaccaccgcggcgcgaccatccgcaagaagatgggccagcggtccgcctaccgcaggcgccgccggtcggcgaacctgcgccaccgcccgccccgattcaacaaccgcacccgccccaaggggtggttggccccgtccctgcgacaccgaccggacaccaccatggggtgggtgcaccggctgacccgactcgctcccgtgcgcgtggcgcacgaggtggaaccggacccgcaaccagctgcccaagtcccacaccctggacgcggtggcggtcggcaaggtcgaggcgatcaccgagaccgtggacacggtcctggtcgcggggtgcacgggccgtggatcgtatgcccgtacccgcaccgaccggcacgggttccccggctgcggctgccgcgtaccacgcggttcttcgggttcgccaccggcgacctggtccgcgccgccgtgcccaccgggaagaaggccggaacccataccggccgggtcgcggtgcgcgcctcggggagcttcaacgtcaccaccgcccgcggcaccgtccagggcgtcaaccacaggcacgtccgcctgctccagcgagccgacggctacgcctacaccacccggaaggagaagggcgtttcctcccggccctga

SEQ ID NO: 893 - DNA, 298 bp, Nocardiopsis sp. CNR-923
gtaaagggatcctggtcctgaaagaccgggctttcaacccgcgtggttgagggccgcctttaccagacccagccatcacccatgaggaggtgacctcgatggctacgttccgcacaggacgaaaggcccaccctggcgtgcttcctcagcgccaggccctggaatccgcgccagctgacactccccggatcgggaacgaaacagggcacggagaccaccggcaggtggtacccggtgcggaacatggtcgaggggagaccggtaccgcctcacctggcggttccggtgtcacccccga

SEQ ID NO: 894 - DNA, 1626 bp, Streptosporangium sp. 'caverna'
atgactacgtttcctgtgagtgagaagacccaccaagccgtgcttcctcagcggcttgctctggaatcggtgagagcagacaaccccgagggtggggacgaaacggctcatcgacccccggctgtgccgggcactggcatggaacatgggcgaggggagatcggttcgggcggcacccgcctggaccggcgtcaccccgagggtgcttcggcgtctgagggagcggaccgtgaggttcacccggccgtgttcgtcctggacgcacacggccaatcgctggatccgtgccacccggcccgtgcccgtcgcctgctggcggcgggtcgggcggtggtggcccggcacaccccgttcgtcataaggctcaaagaccgcacggtagccgactccgccatccagggtgtgcaggtcagcatcgaccccggcagcaaacacaccggcatcgcgatattcaccgaatacggcgggagccggaccggcgtgtacagcgtgcagctcgaccaccggggtgcgcagatccgagacaagctcacctcgcgggccgcattgcgccggggccgccggtcgcggaacctgcgctatcgcgcgccccggtttaacaaccggacacggccgaaggggtggctcgcgccgtcgcttcgccaccgcgtggacaccaccatgtcctgggtgtcgcgcctgacccggtgggctccggtcaccgccatccacgtggagaaggtcgccttcgacacgcacgccctgtcggcgggtcatccgctcgaaggatcgcaataccagcagggcaccctcgccggatacgaggtgcgcgagtacctgctggagaagtggggtcgcacctgcgcctactgcggcgcccagaacgtcccgctgaacatcgatcacctccacccgcgctcccggggcggctctgaccggatcagtaacctcgtcctggcgtgcatcccgtgcaaccaggcgaagaacgccactccgatcgaggagttcctgaagagcaggcccgcgctcctggcgaagatcttcaagcgggcgaaggcgtcgttgcgagacgcggcggcggtcaacgccacgaggtgggcgttgtggcgggcgttggacgcgaccggcctatccgtgactacggcctcgggcgggcgcacgaagtggaaccgctcgcgcactggcgccccgaagtcgcacacgctcgatgcgctgcacgtcggtgacctggagacggtgactgcctggccgtccatggtgttggtggtgaaggcgaccgggcgcggcacctattgccgtacccgcaccgacgcctacggctttcccaggctgcggctgccccggatcaagcaggtcaaggggttcaccaccggcgacctggtccgcgcgaacgtaccgaatggcaagaaagccggggttcacaccggtcgggtcgccgtccgctccaccggaagattcaatatcaccacgcggcatggcaccgtccaaggaatcggccaccgccacattcggctactccaacgagccgacggctacggctacaccactcaatcagacgcccggactattccgtgtttcctcccggccctgaaggaccgggtttccacgctggaggtaatcgatgacacttccggcatctccccatga

SEQ ID NO: 895 - DNA, 303 bp, Streptosporangium sp. 'caverna'
gtcaacgaccccggcctgaaggccagggcctgaggtgccgcattgtgcaccgatggccccgcgttgaccagccccagtcatcagctcaaggaggtgccttttgatgactacgtttcctgtgagtgagaagacccaccaagccgtgcttcctcagcggcttgctctggaatcggtgagagcagacaaccccgagggtggggacgaaacggctcatcgacccccggctgtgccgggcactggcatggaacatgggcgaggggagatcggttcgggcggcacccgcctggaccggcgtcaccccga

SEQ ID NO: 896 - DNA, 1434 bp, Unknown
  Ga0307928_10027040 | JGI
atggtaacttttcttattgatggaaagaataacatactgcacccaacaaagaaatcagacatgatttatcgctggctgcgtcaaggtaaagcaaaagtactgaaaggtggtcttaaaccaggacaaccattattagtacaggtatttaaaacatttatgaaaccaacaaaatgtaactgtgaattcagaatcggaattgatcctggatacaaacacattggttactgtatttataaaatagatgtggagaaacagacaataattgcattaatttctggagaagttgaaacaagaacttcagaaattacaaaaaatatgttagaacgaaagatgtatcgccaaaataggagacataacagaagaaaaaatgttaagagaaaatttaactcatgtaagtttcgaaaacctgtatggaaaaacagagcaaaacacaagtttcaaccaacacactggcatttgattaactctcacaacaatctcttaaagtggatcttcgacagaattccatttgaacagagtaaattacatatagagtacaatacatttgatatacataaagttatcaatccaagcatttacaaatggcaatatcagaaaggtccacagtacggatttgaaaatgttaaatcatatgtacgatatcgagacaattataaatgtcaaatatgtaacaaaaatgttggaaaagaaatgaatcatgtacatcacattatacatagaaatgatggtctaaatgatcggcctgagaatttgattctattgtgtactaaatgtcatgatgctgttcatgctggaagagttgcatgtccaatatcaacagcaaaaagtttcagagacatgggtgtattaaattcctgtatgaaatatttatttgaagagtatgaaaatgtaatttcagtacaagatatttatggacacattacaaaaactgttcgaaagaaatatggaattgaaaaatcccatgcaaatgatgcgaaagtaatcgcgttatgtgattcaaatgggtttaccgaagagttcagagagtatgattggagtgattctaatattgttataaatttcaaacagagcagaaggcatgttcgaaattgggtacagagatatgaggatcgaaagtattacatgattggaaatccatattgcgatgcatggaatagaagaaaacgatctggacaggagaaaatgagtttgaaagagtttcgaaagttatatccgaaagaacaactgaatgcgaaacctgggagaacaatatatcgaaaaaataacagaaatatcttattcaaacctggtgatataattaattgttcagaaggagttgatactattaaaggctgggcatctacacaacataaagttgttggagaacgccttggacgaattcgacaaggagattgtgaaaaagtgttaaacagttgtggaatgtgtattgtttaa

SEQ ID NO: 897 - DNA, 313 bp, Unknown
  Ga0307928_10027040 | JGI
tcaagtaccgggcgcagagcacccggcttgggatgagcgcagagcgcttatgctaacgccgagaactttgcttctgggcttgaacagacactctgaccagatgttcaccctgagataccactcccagtttcaggctctggaggtaaccagtccttattgctgaccagtaggtaacgaagatcagtattacatctggccaagtcgagggagaccaagtcttcataaggagatgccgaccaatggtaacttttcttattgatggaaagaataacatactgcacccaacaaagaaatcagacatgatttatcgctg

SEQ ID NO: 898 - DNA, 1329 bp, Unknown
  Ga0209749_1010998 JGI
atgagagtactggttttatcaagcataaaggatcccctcatgccctgccatccggcacgggccagggagctactaaaaaagggacaggctgcagtattcaggcagtacccctttacaattatccttaaaaacaggcaggcaggtatttgccagccctttgaactgaaaattgatccaggcagtaaggctacaggtatgacgcttgttgctgattgcaaaaagggttatagggtcttctgggcctctgaagtaactcaccggggtcaggcagtcaggagtagtcttgcggaacgcagggcaatacgaaaaaaccgccgtaaccgcaaaacccggtaccgagctccccgcttcttaaaccgcacaaggcctgaaggctggttggcaccatcgcttatgagtcgtgtgtacaatatgcaaacatgggcagcacgccttataaaagtgtgccctgtaacagacattcatcttgaactcaataaatttgacacccagcttatggagaatcctgagatcacaggtgttgagtaccagcagggcactcttgtcgggtatgaaatcagggaatatctccttgagaagtggggaagaaaatgtgtgtattgtggtaaggaaaacgtaccccttgagattgagcatattatacccagatcaagaggcggtagcagtcgaataagtaatcttgcccttgcttgtaaaacatgtaacaaagataaaggcaacatgacagccgaagaatttggttatcccgaagtccagaaagcagcgaagctgccgctaagggatgctgcagctatgaacgcaacacggtatgctataggcagggcgctcaagcaaacaggtctttatgtggctttctggtctggaggaagaacaaaattcaaccggattagtcaaaactacccgaaagagcactggatagacgctgcatgtatcggagagacaggagacagggttattatccctgccgggacaaaacctttaaatattactgcagccggccatggcaacaggcaaatgtgcgggacaaataaatatggtttcccgatacggcacaggacaagagataaaaagtattttggtttttgtaccggagacatagcaaaagcaatagtgccaaaaggaaaatatgtcggtacttatataggtagcatagccataagagcatcaggatattttgatataaagaatggagcgggaaagcgaattgtacaaggaatttctcataaatattttaaaacagtccagcattttgatggatacagatatgagacaggcaatgcattcctcccggcaataaattgccgggcttcctgcgtggaaggatcgtga

SEQ ID NO: 899 - DNA, 282 bp, Unknown
  Ga0209749_1010998 JGI
gtcaactacccgggttttaaaacccgggcatgaaagagagttcacataattctcttcatgccccatgttgaccaggtacagccacggatcataaggtctatggggctacgttattccggtcatgacaccctgaagtgcttgccagctttaggctctgtcgtcaggcattaaacaggcataaggggtttagaccagtgtgtctgacacaacaagccggaataacattaccgaggcaaacattaccgccgcaaggcgagaacaaggagtaatctttttatgaga

SEQ ID NO: 900 - DNA, 1284 bp, Ga0376086_0000584 JGI
atgtccaatgttttcgtcttaaacaccaataaacagcttcttaaccctatccatccaggtcgggcaagaatgctgttgtctcagggaaaagccgctgtttttcgacgctatcccttcaccttaatactgaaagaggaggtgttaaatcctcaagttgaaccactccgcatcaagatcgaccctggcgctaaaaccagcggactagcaatagtcaacgattgcacaggcgaagttgtttgggtagccgaattgcagcatcgcggttttcaaatccgggatgctttaacctcacggcgtcaactccgacggtcacgtcgcaatcgcaaaactcgctaccgtcaaccacgctttctcaatcgcacccgaccaaagggatggttaccaccgtccctcaacagtcgagttgctaacatcctgacttgggtcaagcggctgtctgcgctatgccaaattacagccatatctcaagagttggtaaggtttgacacccagcagatggaaaatgcagaaattagcgcaattggttaccaacaaggcacgttggctggatacgaaatccgtgagtttctgcttgagaaatgggatagagcctgtgcttactgcggcgcaaaagacaccaagcttgaaattgagcatatccaacctcggtcaaaaggcggttccaatcgtgtcagtaatttgtgtctagcttgtgttccttgcaaccagaaaaaaggtaaccaggatattaaggagttcctcaagggtaagtcagagctactcaagcgaattttggcacaagctaaaagacccttagctgatacagcggctgttaatgcaacccgatggaatttgtatgaaaacctcaagaaaacaggcttacctgttgaggcgggcacaggtggtcgcaccaaatacaaccgaagcttgcgaggtttagagaaaacccattattgggatgcggcttgcgttggggcttcgacaccagaacagttaatcacatcagggattaagccaatactcattgctgccaagggtcatggaacccgtcaacaatgccgcactgacaaatgggggtttccggtgcgttactgctctagaaccaagtttcacaaaggttttcagacgggtgacatcgttaaagcagttgttacctctgggaaaaagattggagtttacgttggtcgtgtagccactcgtgccacgggtagtttcaatatctcgacacctgacgggctaactcaaggcatcagccacaagtactgcatacacattcacaaaaaggatggttattcctatgtatag

SEQ ID NO: 901 - DNA, 254 bp, Unknown
  Ga0376086_0000584 JGI
gtaaactacccgccaccaagctgagtacagctatggtgggggcttttaaaaaaaagtccagagtttacccgactaagtaccttgtgtactacgttttagaagccatcacaccctgggatacgaagccagtcccctgctctgtggctgacgattaaacaggcatatcgggttgaagccagtgtcgtcagcgcgacaaacttctaaaacattgtcaaggctaacattacccgcaaggagggacaggaatgtccaat

SEQ ID NO: 902 - DNA, 1587 bp, Synergistales sp.
ttgaccagcgggcctggtctccaggaccaggcagacgttgcacacaggttcaagacccaccgtagagcgcttcctcaactctacgctctggaagcccaagcagcagacaaaccaacgggtggtacgaaacgggtttgggcgcaacgccgatgtgcaacagccgcgaggggagattccgcactatgtgcggaacgttacggagacggatgcttttatccgtcaacggatttacggaacctttacgggttccacctgtttggaggtattgtcatgtatgtgttcgtactggacaagcacaagaagccgctgacaccgtgccgcccgtcaagggcgaggcatctgctcggctcggggcgggcggtcgtccacaagcgtttccctttcaccatccgtctcaaggaccggacggcggaagagagcgttatcaaacctgtccgtgtcaaggtcgacccgggcgcccggttcaccggaatagccattgtccgggaggacaggcaaggtggaccccgtctgattgccggaatcgaactggaacacagggggaacgctatacgagacaacatgacgaagcgggcgggctaccgccggagacggcggagcgcgaacacccgctatcgtgccccgagattcgacaacaggcgaagaccggaaggccggtttccgccgagcctgcggcaccggatcgacacgaccgtctcgtggatgcggcggcttacacgcatagcgcctgtctccggattcagcgtcgaatcggtcaagttcgatacgcagaagatgttggacccggaggtttcgggaaaggagtaccagcagggagagcttgagggatacgaggtgcgggaatacctgctggaaaagtggtgtcgcaagtgcgcctattgcaatgccgggaacgttccgctgcaggtggagcacatcgtaccgagagcgagaggcggttcggacagggtgtcgaacctgacgctggcgtgcgagaggtgcaatcgggccaagggagcgcgtcctgttaaagagtttctgcatgacaaaccggcgcttcttggacggatacgggcgcacgcgaaagctccgctgtcctccgccgctgcggtcaactcgacccgcaacgcactctttggcgagatgcgtgcgtttggcttgccggtggagacggggagcggcggactcaccaagtacaaccgcacccgcctcgggctgccgaagagtcatgtgctcgatgctctgtgtgtcgggacagtctcttcagcaaaagttttaacagacagcgtcctccatgttcgctgtacaggacggggacgatactcacgaacactgacggacaaatacggattcccgagagcatacctccctcggggtaagcgctttttcggattcgccaccggtgatatcgtccggacggcggttccgaaaggaaagtacaaaggaacgtggacagggcgggtggctgtacgggaatctgggtggttcgcactgtccacagggaaaaatacgccagacggcaaaaaagagagggttaatgtcaaatgggatacctgcaaaatactggaacgaaacaatgggtacgaatacagcgtaatagcggtgtag

SEQ ID NO: 903 - DNA, 276 bp, Synergistales sp.
gtcaattacccgccacctaaccgatgttaacgcctcggtttgaggtgggggcttgaaaaagcccagattgaccagcgggcctggtctccaggaccaggcagacgttgcacacaggttcaagacccaccgtagagcgcttcctcaactctacgctctggaagcccaagcagcagacaaaccaacgggtggtacgaaacgggtttgggcgcaacgccgatgtgcaacagccgcgaggggagattccgcactatgtgcggaacgttacggagacggatg

SEQ ID NO: 904 - DNA, 1365 bp, Unknown
  Ga0310695_10017382 JGI
atgacagtattcgtggcagcaaaagacggtacaccccttatgccgactttcaatatcaaaaaggtacggcgtatgttaaaagacggtcgtgccaaaatctacgggtatagcccgttcacaatacagttacagtatgagagcacgactcatacgcaagaaattgaagcctgtgaggacacaggtgaccattatgtaggattttcactaaaatctaagaaacatgaatatgtttcagggcagtatgaccacttgacggatgagaaactgcgccacgatgatgcccgtaaactccgcaggagcaggcgaaatcataagcgctaccgcaaaccgaggtttgataacaggagacacctcatgccggaaggcgataaatggtttgctccatccataaggaataagatcaacaaccatttatccatactgcaaaagtatcataaagcctgccccataaaggatatttaccttgaatgcggctcctttgacacacagaccttacaggcggtagaggcagggcttcctgctcctaaaggtaaagattttcaaagaggttcaagatatggttacgatactttaagggaagcagtattcgcccgtgacggatacaggtgtatatgttgcggtaaaggtatagaggacggtgcggtactccgcctccaccatttaggttataagacaggcgaccacaccaaccgcatgtcggggcttgcgactgtatgcacaaaatgccacacaccggcagcacataaacctggcggaaaactttatgaacttgagccgaaactcaaacctttcaaagctgcgagttttatgacatcgatgaggttccagctcataaaagacgccaaagttttgcttccaaacacagaggtacacatatgctacggggcatatacaaaacgcgaaagattgtcgcgtcgaatcagtaaatcccacgccaatgacgcttattgcataggttgtttcagatcggcgcacaggacggatataaagcattataaaaaactccgccggaacaaccgcatccttgaaaaattttatgacgcaaaggttatagatgtaagggatggtacagcacataaaggtgcggaattatcctgtaaccgcacaaaccgaagtatttcaaggaataacgaaaacaatctccgtatataccggggaataaaagtgtccaaaggacacaggaacataagaacaaaaagatacgccatacgtcccggtgatatggttctttaccaaggcaaacgatataagtccaaggggttgcagcattatggcgaatacaccactttggaagggcataaggcggtcaaagtaaaagacgtaaaaatcattaaacacactggcgggtgggagacggcagcatga

SEQ ID NO: 905 - DNA, 439 bp, Unknown
  Ga0310695_10017382 JGI
gtcaataaccccatctaaatgcattgcattatagatgaggcttgtaaaagaaaaggcttcgcgcctgacttttcaagcctgattgattagcctaagtccgtaagtcttcggaaactacggactacgttaccggtgaattcctgggagggcgaccgtttgtaccaggtaaacaggcactccggggtactccacaagccccgccgaccacttaggtggccggggaatgaaatacaatacacgacactgcggtctgtatttaaacatccgtgtaacagcggatatgcctgagggtagggtaagtgatacagacaataaaaccaccggataacattggcgatgtggacccgcccttttgggcagaaccccgggatgctttatatcccgggaagccgtaaggcaacttgttttaagaaaggaggcataagaataatttatgaca

SEQ ID NO: 906 - skipped

SEQ ID NO: 907 - DNA, 243 bp, Unknown
  Ga0197142_1000319 JGI
gtcaagtacccccagctaaagctgggggcttgcgggagtagagcctagccagctggaaaccgcaagggcaaggaaagactagcctgcccaagcaacctgttctacagggggcgtttgaagggaactgaaccaactggacgtggcagtccaaaagacgtagcgaatgcttccctagtttgctacctctctgttggtcagtggcaaagggatgtacacactccgaaaggaggcttacttaacaat

SEQ ID NO: 908 - DNA, 315 bp, Unknown
  Ga0310136_007496 JGI
atggtatatgttatttcaaaggatggtaaaccattaatgccaacaaaaaggcatggtaaagttagaaggcttttagaacaaggtcttgctaaagttgttagaagagaaccatttacaattcaactattgtatgatactacaacatatacacaacctgttgtagttggcgtagataatcgttcactgcataaagcaaatccaattaaaggtggaaaaagaccagtaaatactgtaaaggaagttagagggtttagaagattcgacaaagtaagatataaaaatcaaattggtataatctacgggttaagaatctct

SEQ ID NO: 909 - DNA, 255 bp, Unknown
  Ga0310136_007496 JGI
gtcaactacccaccacctatagaggtggaggcttgcaaaagccttagttgactaccctcagccaggggaagttaatcttcctatcgggctacgttagactggtcatgacaccctgggatgctgctcaagttccaggctctgtcgtatgtacctaaacagtcctgaggggtagggacagtggtgcatgcataacaagccagtctaacattggggatgagcgcctaactcctaaccaaaggaggcttaccgcatatg

SEQ ID NO: 910 - DNA, 963 bp, Unknown
  Ga0181858_1003566 JGI
atgaaaactgtgaaccgtgtgttggtcattgacaagcatgggaaaccgctcatgccgtgtcatcctgcacgggcgcggcaacttctcaggaaaggacgagccgtcatctaccgtcgttatccattcaccatcttgatcaaagaccgggaagtaaggaatgacgggaaagacgtccagccggtcaggctcaagatagatccgggctcaaaggtcaccggcctttcacttgtcggtgagttccaacgagggaagaccgttatctgggctgcggaactgcaccatcggggccagcagatccgtaatgcgcttgcggaacggcgggtacttcgacgttcacgccggtatcgcaagacacggtatcgtgctccacgatttctcaaccgccgccgcccggaagggtggcttccacccagcattatgagccgtgtgtgcaacgtgcgcacatgggtgtatcgcttgcagaagtttgcgcctgttacaagcctttcgatggaacttgccaagtttgatacccaaaagctgatgaatcccgagattcagggtattgagtaccagcaaggcacgcttttcgggtatgaggtgcgggaatatctgttagagaagtttggccgccgttgtgtgtactgtgacagggaaaatgtgccgctggaaatcgatcacgttattcctcgttcaaaaggaggtggtgatcgtgtctccaaccttgtcattgcttgccatgactgcaaccaggaaaaaggcaaccgttcactggaagaattcctggcgcatgaaccagaccgggccaaacgaatcaaagcggagcttgagacaccgctcaaagacgcggcggcagtcaatgcgacgcgatggactctctttcatcttctgaaagagacagggttggagcttgaggttggaaccggcggtcgaacgaagcgtaaccctcttaagccccgaaattggattggacagcctccctaa

SEQ ID NO: 911 - DNA, 266 bp, Unknown
  Ga0181858_1003566 JGI
gtcaactacccccgtctgaagacggaggcatgaagcctcggagttgaccagcctcagccagggccaaaggccatcgggctacgttattccggtcatggcaccctggggtgcttgggccagctccaggccactgccgtccggcattaaacaggcatacggggttgaagccagtgtgccgggcatgacaagccggaataacattggcgaggcccacatgaccccacgaagggaggaagcgggtaaccgccatgaaaactgtgaaccgt

SEQ ID NO: 912 - DNA, 1284 bp, Unknown
  Ga0137378_10000779 JGI
atggtctttgtactcgataggcacaaaaagccgctgatgccctgcacacccaaacgggcacggctcctcctggcgcgtgggcgcgctgtggtccatcgcctcaagccgtttgtcattcgcctcaaagatcggtgcgtcgaagattcggtgctgcaagccatcgcgctcaaactggatcccggcagcaagaccacgggcatggcgctggctcgtgtggaagagacagaggagggagaagtgcatcacggcgtgcacctctcagaagtgcagcaccggggaggggaggtccacgcggccaaacagagccaaaggaatgtccgtcgtcggcgccgcagcgccaatctgagacatcgcaagccccgctaccagaaccggcgcatccccaaaggctggttgccaccctccctgctgagtcgggtgggcaatgtgttcacctggacagctcgatatgcccgctgggcaccaatcacccggatcgaggtcgagcgagtgcgcttcgatacgcagttgctccaaaacccggaaattgacggagtgcagtatcagcgaggcgagctcgccggatgggaggtgcgcgcctacctgctcattaagtacgagtataggtgcgcctattgcgggaaaacgagcgctgccttcgagatcgaccacatccgtcctcgcagtcgcggcggctccaaccgtgtgtccaatctatgtgtcgcgtgtcacgactgcaatcaggccaagggagaaaggacggcggccgagtggaaacacccagaagtggaagccagagccgggaccccgctcaaggatgctgccgctgtcaacgcgacccgcttcaagttggtcgaggccctgcgagtgttcggacggcccatcggcgcgtggacgggcggacggacccgctggaaccgggcgagattcttgctcgagaagacgcacgccttggatgcgctgtgcgtgggggagatcgcgggcgtccgggcagggaagatcaagacactacgcatcacggcgatgggtcggggcgatcattgccgtaccaactggaccaaagcggggttcccgcgtggctacaagatggggcacaaacaagtcagaggtttcaaaacaggagaccgtgtgcgggccgttgtcccagccaggctcaagacggcgggcatccacgtcgggcgggtgcaggtgcgccaaagcggctcctttgatattgagacacgcgagaggaggattgcgggcgtcaatgcgaaatactgtcagctggttcagagaggagatgggtatgactattccctcgcctaa

SEQ ID NO: 913 - DNA, 312 bp, Unknown
  Ga0137378_10000779 JGI
gtcaacgaccccacgcgtaaatgcgggggcttgtagtgggtctacaagctcgattcgttgtccagccccagttcctgatcccgcaggccgggagatgaaggaactccgttagatgggtcagggcaccaccgaacgcctcctcaattcggcgccactgccgcccagggttaaaggtcctcatcggggtggggacggtgctctgagcgcaacaagcccgtcgaacatggacgagaggagcggtgtgggaacgcctgcccacgcccgtcagtcagccccttacggggcctcgcaagaggaaaaggaagaagcatg

SEQ ID NO: 914 - DNA, 1350 bp, Unknown
  Ga0247842_10000474 JGI
atgcagaagttattgagaagacggttaaccgacacacctacggatgtacaatcactcctagtctgtagctctgtggacttgtctttaaacagacctcaaagggtcagtgagcaagttttatcaactctcgataacaatcccgaaggagttcaacctgaatacacacaggggcttaaagccaacaaagtgtatgttttaagcattgagggaaaacctcttatgccttgtactccatgtaaagcaaagaagttattaaaaaacaaacaggcgatagttattaaaagattcccattcactattcagattaattttgaatgtgaaaatcaagttcagaaagtaacgctaggcattgattcaggatatgagaatatcggatttagtgctgtatcagaaacaaaagaattaatatcaggaacagtcaaacttgatggaaaaacatctgaaagattacaagaaaagaagatgtatcggagaggaagaagaaacaaactctggtacggaaaaccaagattccttaacagaacaagaaaagaaggttggctccctccaagtgttgacagaagatatcagacacatttgaatcttatcaacagactgaagaagattcttccaataacacaagttattattgaaacagctaaatttgatattcaaaaaattatgaatcctgaaattgagggcattggttatcagcaaggttctttatatgaatatcaaaacatgagagcttatcttatggctcgtgaacatggaaaatgtcagttatgtggtaaagattttaaaggaaaatcttcacatatacatcattgtaagcaaaggtcagaatcaggaagtaacagagcagagaatttagctatacttcacaaagattgccatatcaaattacataagcaaggtctgaaattatcaaaaccaaagagttataagcctaatacttttatgtccataattaacaaaaagtttagacaagatattccagatgtaaaaattacttatggaaacatcacttttgtgaataggaataatttaggattagaaaagagccatgtcaacgatgcttttgtaattgcaaatagaactatgcaggaaagaattaatccttggaacatagaacaaaaacacagacataatagagcgatacagcttaacaggaaaggttttaaaccttctataagaacatctgtgtacaagattcagccaaaggatttgatagcagttaatggacaagtgttttctgttgtaggaatacagaacaaaggttcttatgtaaaagttaaagattacccaaaagtcattcctacaaaaaatatagagagtatgtataatttcggaggtttagtatggaactaa

SEQ ID NO: 915 - DNA, 268 bp, Unknown
  Ga0247842_10000474 JGI
gtcaactaccacgggaacaagccccgtggcttgaacagtgatgttcatggtaacagttgattagggagctaaaggaaactttatgcagaagttattgagaagacggttaaccgacacacctacggatgtacaatcactcctagtctgtagctctgtggacttgtctttaaacagacctcaaagggtcagtgagcaagttttatcaactctcgataacaatcccgaaggagttcaacctgaatacacacaggggcttaaagccaacaaa

SEQ ID NO: 916 - DNA, 1284 bp, Unknown
  Ga0310696_10000167 JGI
atggtttatgtgttgaacaagtcgggaaccccactaatgccaactagacggtatggtaaggttcgccgtcttatcaaaaccggattagctattgtaattcagcaccaaccgttcactatcaaattattatatgatactcttaacaaagtacaatttgttaatctaggtgttgatgcgggaagtaaacatgttggcttttcggcatctacaacacaaacagtattgtttgaagctcaactagatttacgaaccgacatcactaaaaaaatagcaactcgcaaacaatatcgtattggacgacgctaccacaaaacacggtatcgagaagctagatttaataatcgtatcaaatcaaaacgacataattgggtagcgccatcaattaaaaataaaatcgatagccatatatattggattactcgaatatgttcttttttaccaattaaaaaaataataattgaagtaggacaatttgatactcaattattaaaagcaaatgataataatgaacttgctcccaggggacgtgactatcaaactggtgtgcaactcgccttttggaatacacgcgaatatatattataccgcgacaatcacacttgtcaatgttgcaaagggaaaagtggcgattcgatactgaacattcatcacattgaaagccgcaagattggcggaaatcgaccagataatttaattaccttatgtaaaacatgccatcgcaactatcacgctggtattttaaaattacctagtcgaataaaacgacccaaatcatatcgggatgccgctacaatgaatatgtttcgaaaccacatgtataaacaattaaaacaaatgcttgaaccaattattcaagtaaatgtaacatatggatatatcactaagcattgccgcattaagtataacctacctaaaacacatataatagatgctagatgcattagcgaacacccattagctaaaccgagttcaacatattggcgtatcaaaaaacgaagaaaccataatagacaattgcacaaatctaccattcttaaaggtgggttaagaaaaaataatcaagcaccatatgaagtatttggatttcgattatttgacgctgttaaatatcaccaaatgacttgttttgtaacgggacgccgtttaaccgggttatttgcaataaacaatattgataaaactatacgggacaattcaattagttataaaaaattatctcatatgtatcacactaattctaacctaatggaggaaatgatgtatcattcatctaataccaactaa

SEQ ID NO: 917 - DNA, 295 bp, Unknown
  Ga0310696_10000167 JGI
atcaacggcccatagatgtataatctaaaagtgaatcttgaactctttgctctggataacacttttcgttgattagactcagtgaagcataataatatgctgaactatgttaaaaagaccatgacaccctgagatatttggccaagtctctcgccctgtcgaacgatattaaacaacccagatgggtaagggtagtgtatcgttcataaaaatctttttaaccttgtcgatggtcacccacagggattaatccctgcattacctattaaattaggtataaaaggatagcgaaatg

SEQ ID NO: 918 - DNA, 1437 bp, Unknown
  Ga0257048_100529 JGI
atgaaaacagataaatttgtacttgttatcggcatgaatggtcttgggcttatgcctacaacaccacaaaaggctcgaattcttttgaaagaaaagaaagcttttgtaaaaagaaaagtaccattcacgatacaactatcctacaagacaggaagtgcaacacaacaaacaagattgggaatcgataccggttctcaaaatataggagttggcattactgacaatcaagaaaatgttcattctaaatcagaatataagttgcgttcaacaatggaaaaaagacagcttatagaaacaagaaagacttatcgccaaggaagacgatatcgaaaagtaagatatcggaaacctggctataagcctcatacaaaatatatctatgtaaaatgtccggtaaaaagaaatggtaaaatgacacactggatgaagtcgaaaaatgaatatggaactaacagatgcgaaggatggctaccaccttctgttcagcaaaaagttgaccatcatattcaaattattgacagatatcttgaagctttaccaataaatacaaaactgacaatagaaattggacgttttgatatgcaacaaatcaaaaatcccaatatttcaaatgaagaatatcaacagggacgcatgtatggctatgaaaatatgaaggcatatgtacttcataagtatggctatagatgccctgtatgtggacaaaagtttggaactgaaagaaaaaataagacgattgttctacctcaaatgcatcataagcatttcaagagcaaaggagctacagataacccggacgagtatatgcctgtgtgtgataaatgtcataatgcagcagctcataaaaatggtggagttctcgatgctataagaaaagctgaagctaaaaacattcgaggtatgagagatatgacacttatgaatatcgttgcctatcgacttatggattattataaagaagcatcatttacttttggaaacataacaaatgccgacagaaaagaattgaaaatgggtaaatctcattccaatgatgctgtgactatagcattacatagtgatattctttgcggaaatgtagaaataaatgatacagaaacaactatttattacaagcaagtcagaaagaaaaaacgttctcttcatgaagctacaccgagaaaaggtcgtaaacttccaaataaagaagctaaacgtaataataagaatacaaaagaagttgtttctaaaggaaagaagtattctttatacgacaaggttgtctataatgaacaaaatggatggataacagggtttacaggaacttcagcttatgtacaaacatatgatggagaatatctaattcctgtaggaaagaattataaacaaataagtctttcacaattggaattcgttcaaagaaataacaattggatattagaaataaaaagaaaatga

SEQ ID NO: 919 - DNA, 348 bp, Unknown
  Ga0257048_100529 JGI
acaagtaaccgagcttgtaaaagcttggtctttagctgccctgcttcgtagggacgatgactagcctcagtttacataccacaattcgtaagctacgtttatagaatcaacactctacccagcgatgccctaactggtatgggttggagctctgtataagactgaaagtaaggttgccgcaactccatgcatcaagttctatagacattggcgaagggcaacgcataccgtcttgttgtgaagacaggagcgaatacgcagggatgcggatgagacagtgctgtactcatcatatcttttatataaataacaaaggaggcatagttcaaaatgaaaacagataaattt

SEQ ID NO: 920 - DNA, 1236 bp, Clostridium estertheticum
atggtcgaatattcttttgtagtggacttatctggcaacagattaagtccctgcaacaaaaataaagcatattatcttattcgtaaaaataaagctaaaatgcttaataaatttccaatggtaatacagttacaaaaaacagttaaggatgacaagaatgatgatgttaaaaattatcttggaattgatgatggaagtaaaaatgttgggctcggaataattcaaaaatgtaaaacaaaagttagaacaatttttaaaggaactatagaattaaggcaggatgtttctaaaaaaatgactgtacggaagggctatagaatgtatcatagataccataaaaggtatcgtaaaatgagatttaataacagaagcgcatctaaacgcaagaatagacttgttccaactatactacaaaaaaaacagtctatattaagggttgtaaataaactgttaaaatggactaagatagatgctatatatcttgaagatgttcttatagacataaggtctatggttgaaggtaaagctctatacaaatggcagtatcaaaagtcaaatagacttgacaataacatcagattagctgtatttatgagagatggctttaaatgcgtagactgtaattctaacaccaaacttcaaatgcaccacgctaaacccaaaaatagtggtggagcagatagtatttataatggtgtaactctatgcgaaaaatgccacatgaaaacttttggcaaagagttgctgatgatggatggatatttaactaagattaaaggtaagaatctatgtcttacacatccaatgcatgttatgcaaggtaaaaaatatctgcaagtggaacttgaaaaaatagcaccgatatctttgactacaggagctgatactgcaaatcatagaatagactggaatatagaaaaaagtcattctaatgatgctttagtggtttgtgacactgaaattaaagctactgatatcaacattaaagactggtatataagagctttacgtaagaaatcaaagggtgatacagatacgattattgatggatttaaattaagagattatgttaaatatacaaagcgaaatggcataagttatattggatatatcacagcattgtatccagttaagaaacagtttaacatgacaactaaagatgatattgtacttaaaagatacggattaaaaagtcttagccttatttcaagaccaaatagtatacggttttcataa

SEQ ID NO: 921 - DNA, 262 bp, Clostridium estertheticum
atatacaaattgtaagaagtgaatgttgctttcaagcctaagtgagtgtagttttttgaaaaggaaatagcacgatgaactacgttagatgatcggttaaagacgtacctttagatgtacttcagtctgaagcactacgatagttagaaagaaactaacctaaggcattgttatggttagacacatcaaaactcaatacaccaccatttgacattggcaagaagaaaaatacccactaggaggatgactagagatggtcgaa

SEQ ID NO: 922 - DNA, 966 bp, Acidithiobacillus sp. GGI-221
atgcgtcgtccgaaaaaagccccgataaccttgccgaggcacactttacccgcgagagcggagactgaaaaggtagcgacatgcagaacagagtattggtattggacaaaaatcggcaaccgctcatgccctgccatccggccagggcatgagcggttgctggaagggaaggcggcggtgttccggcgctatcctttcgtcatcatcctgaagcaccgggagggtggtgaaaagcaggaattggtggaaaaactggatccgggcagcaaaaccaccggcattgccctggtggcttcgttcgcccgccgtggacccaccgttatctgggcggccgaactggcgcatcgcggcgcggccattcgcaaggcgctggagcagcggagcgggcatcgacggcatcggcggggaaacctgcggtaccgggaaccccggtttgataaccggacccggcctgcgggctggttgccgccgtctctacagcaccgggtggacaccaccgggacctgggtggcgcggtgtggccgatgggcgcccgtaacccgcctctcgcaggagttggtgaagttcgatctgcaggccatggagaaccccgagatatccggaacggaataccagcagggaacactttggggctacgaagtgaaggaatatctgctggagaagtggggccggacctgcgtgtattgcgacgccgagatggtgcccctggaggtggatcatattcatccaaaaggtaagggcggcaccgaccgggcagccaatctcaccattgcctgccacgactgcaaccaggaaaaagatcaacagcccctggatctgttcctgaaaacgggcaagggacggcgccggcgcatgcaggccaacgccaaagcgttcgcgggcaaggacgcgaagaagatcgcgcaacggaagatccatgagggaacccggttgcagcggatacagcgtcaagcgaaagccccgctg

SEQ ID NO: 923 - DNA, 297 bp, Acidithiobacillus sp. GGI-221
gtcaaccactccccctaaagccctaacgggttataggcggagcttgcgggtaaaaccaaaggctcctggttgaccaggctcagtcccagaataccgggactacgttattggggtcaggacaccctggaatgcgcgccagttccaggctctgtcggataaggattaaacagcaagctgggagtagtgcaagccgtgtccttgtggtatgcgtcgtccgaaaaaagccccgataaccttgccgaggcacactttacccgcgagagcggagactgaaaaggtagcgacatgcagaacaga

SEQ ID NO: 924 - DNA, 975 bp, Unknown
  Ga0105758_1004307 JGI
atgccctgttcaccggcaaaagcgcggcttctgcttaaagagaagaaagctattgtgaagaggagaacgcctttcactattcagctgacgattgcaacgggtgagaccaaacagccggtgggtctgggcgttgatgccgggtacaaacatgtcggactgtccgcatcaacggacaaggctgaactttatgcatcccaagtcgaactgcgacaggacatcaccgatctgctctccgctcgtcgtgcgttacgacgggctcgcagaaaccgcaaaacgcgctaccgcgcgccaagattcaacaaccgcatccgcaccaagcgcaaaggctggcttgctccgtcggttgaaaaccgaatcaacgcgcacttgtcgcgcatagaagcggttcttcgactgctgccggtcacaaagatcaccgtggaaacggcgtctttcgacttgcagctgctgaagaatcccgacatttcagggaaagaataccaggagggagaacagctcggcttctggaacatccgcgagtatgttctttgcagagacgggcatgtttgccagcattgttacggcagatcgaaagacccggtgcttaatgttcatcatctggaaagcagacgtacgggcggagattcacccggcaacctgattacgctttgtgagacgtgccataaggcccttcatcgcggtgaaatcacgctgaaggcaaagcgcggacaatcgttccgcgcggaagccttcatgggaattatgcgctgggaggtgctgaatcgcctgaaggcgtcgcatcctgagctggaagtgaacaacacctacggctatcggactaagcacgcacggatcgcgaacgacatcgctaagtcgcattgtgcagatgctttctgcatcgccggcaacctcggcgccgaaaggctcggcgaattcttcttccagaagcagacgcgtcggaacaaccggcagattcataagctttccatcctcaaa

SEQ ID NO: 925 - DNA, 247 bp, Unknown; identical to SEQ ID NO: 779
  Ga0105758_1004307 JGI

SEQ ID NO: 926 - DNA, 987 bp, Human gut metagenome
ttgaaaaaagaagccgcagggcaccggcaggggaaggactgccgccccgtccggtacggtccgccgtaccgggcagggatgccggacggaaggcgtaagccggaaaggaaacatatggtagcagttgtgaccagtactgggaagcccctgatgccgaccagtgcataccgggcacgtaagctcttgaaaaagggacgtgccgttatctttaaataccgtccgtattttaccatccagctcgtggaccgggcagacggggaagtacaggaagtggaatataaatccgacaccggatccgtccatgtggggatcagtgtgtgtacggagaaaaaagaacttttaagcgaacagcgtgaccttctggagaatgaaccggaacatcacaatgaccggaagaagaaccgcaggacacggcggaaccggaaacggtaccggaagcccaggtttgacaaccggaagaagaagccccaggagggccatgaaaaatggctgccgcctaccctcctccacaagatggaggtccaggtacggctgttcagggaattctgcagggttgtcccggtgacctccgcctgcttcgagatggggaaatttgacacacaggccctgaaagccgtatcgaagggggaacccgtaccggaaggggaaggataccagaagggggaacgctatggcacggataccctccgggctgccgtattcctgcgggacggacatacctgccgtttctgcgggcgttccgtaaaggacggggctatcctccatgtacaccatgtcggttactggaagggggaccggacaaaccgtccggcaaaccttgcctctgcctgtgagcagtgccatacccctgcaaaccatgggaagaacgggatcctgtacggaaaggaaccggagtttaagaccttaaaggatgcatcttatatgacatctgtaaggtggatcatgctggacgagatcaaaaaagccgcccccggggtccaggtgtcc

SEQ ID NO: 927 - DNA, 409 bp, Human gut metagenome
gtcaattacccacggccatatctccctccgggagaatgaccggggcttgcagaaggaaagataacttttgttatccggaatgacgtaagcctggttgattacttcaggccagctctgtatgtcagcggccccggctgctgaaactgcagggtaacggctccgttataaaggaatatataggcaccaggggatatcctccacgtcccacttgctctgcggcctgctgttaaacatccctttttgggtacggggaagtgtagccggcataaaccctttataacatcaagtatggagaacacttgaaaaaagaagccgcagggcaccggcaggggaaggactgccgccccgtccggtacggtccgccgtaccgggcagggatgccggacggaaggcgtaagccggaaaggaa

SEQ ID NO: 928 - DNA, 1347 bp, Unknown
  Ga0311351_10027103 JGI
atgacatcaaccaaagccttcgtggttgtcttagatgtaaatgggaaacccatcatgccgacttcaggcaagcgtgctcggaagtttctggcctctggccgtgctcacatggtacgagtcagaccgtgggtcatccagatgaacgacacctaccaagaagactgtaccctcacagacatgatcgtcaaggtagatcctggcagcaagtataccgatgtggctgtggcgatacagcctgagccaggtgtcttgaaggtcaccaacctgatagagttacagcatcgtggtcgactgattagcatgcagctgaccaggagagccgctttttgcagaaacaggcgaaatcgcaatactcgctatcgtgctgcaaggtttttaaatagaacaaagccaaaaggttggttagcgccatctttgatgcaccgtgtcatcacgacggtgaattggtgcaagcgtttgatgaagtggtacccgatcactgagctggctgtcgagtgtgtgaagtttgacatgcagaagatgcaagacgccagcatccaaggtaaggagtaccagcgaggtgagctcttcgagcgtgaaatgatggagtacttgcttgtcaagtatgaccatacctgcgtctattgtgataccaagatagcccgttttgaaaaagatcatgtactggcacggagtcaaaacggatcaaacaggatctcgaacttaatcttgtcttgcagaccctgtaaccaggctaagagcaacctgtctgtgcagacctttctggctaaagatcctgtcagattagctcgtatcttaaaacagctgaagacacctctcagagatgccgcagctgtgaacgctacgcgtaaccgactgttacttgaaatgatcaaacttggcttacctgtctctacagggacaggcgctcagactaaatggaatcgcagcagacttggtattcctaagacacatgcactcgatgctatatgtatcggagatgtaaaaaccgtatctgactggcaaagacctcatcttgaagtcaagtgctccgggagaggccggtatgctcggaccattaccgataaatacggcttccctcgacttctatgtgctcgtaagaaagtacatggaggttttcaaacaggtgatctggtaaaagcttatcgccctgtcgaaaagaaaagctactatggggtagcttctgtgcgagctagattagaattttctatagatttgggcttcggtagagatgctatttctgttagaagtaataattgtaaattactgcaaagagccgacggatacaaatattttctcaagacatacagctatatctttattcaaggaaaatgtattgtcagttag

SEQ ID NO: 929 - DNA, 269 bp, Unknown
  Ga0311351_10027103 JGI
gtccgctacccactctgtaacaagggcaggatgctaaaacatcctagttgaccagtctcagtcctgaaaaggactacgtttgtatagtcatgacaccctggagtgcctcctcagctccttgctctgtcgtctgtcattaaaagtcccgggaggtagggacggtgtggcagacctagtaagctactcaaacattgacgagaggaatttttctaggccgttaaaggcctccgtttaaccaaggagaaaagatgacatcaaccaaagccttc

SEQ ID NO: 930 - DNA, 798 bp, Marine metagenome
ctgagtatttttatgagagtttttgtagttaacaaacatggtgaagtattgatgccctgtaagccgcgcaaggcgaagatcttacttcgtgagggcaaggcaacagttgttaagcgcaatccgtttacgatacagctcaagcatggctcaacgggctacaagcaagatttaacgcttggcgttgatacgggacataatgaagttggtatttctgtcgtatccgcaacgaaagaggtcttttctgctgtcgctaagatgcgcaatgatatatctgacaaaatgactacgcgaaaaatgtatcgccgtcaaaaacgtaataagttgcgctaccgagcaccacgctttttaaaccgttctgcgagcgcacgaaaagggaggctggccccttctattcaatggaaagttgatgcgcatattaaactaattaatcagcttaaatccttactgcctatcactaaggttatcctggagacaggtacgtttgatatggctaaaattaacaatccagacatcacaaacgcgcagtatcaacaaggcgttcagtatggatttgagaatgtaaaagcttatattctggcgcgtgatggatacaagtgccaaagtggaaagaaaggctgctgcgataagctacacgtacatcatatagtgtttagatcacaaggtggttcagatgcaccaagcaaccttaaaacactgtgcgaaaaacatcatgcagcgttacatgacggaaagtggtcgctggccgataagaaacacaagagtctgaaatctgccacgacaatgaacattattcgctca

SEQ ID NO: 931 - DNA, 268 bp, Marine metagenome
gtcaactacccgcagctaaagcaagcgggcttgtaaggtgacttacgagataggtcttcggactgaataggtgattagtctaagtcttaattgactacgttgtttaggttatgacaccagtggatgcctcccaagtctgctgctctgtcgcttggtattaaagagttcaacgactcggtgtgctaagtgcaaaaagcctttacaacattgacgatgggaatcaacccgcaagggattagttaatttttaactgagtatttttatgaga

SEQ ID NO: 932 - DNA, 1065 bp, Unknown
  GENOME_ACESSION: mgm4799991.3 MG-RAST
atgcgcgtacctgtactcgattcaaggaagaaaccgttgatgccaactacttcagccaaggccagaatccttatcaaaactggtaaggcgaagccttactggaataagttgggcatcttctgtataatcctaacgagagaagttgaacccgataaccagcaaatagcagttggaattgaccccggatcttcattcgaaggttggtccgtggtcggtaccaaaacaaccatcttgaacggcatgtctgaggcaccaacttatatcaagaaggctgtggaagttcgcagaacgatgcgtcgcgcacgaagacacagaaatcttcgtagacgtgaagcacgatttgacaatagattgaggaataagtcttcgctaccaccatcaaccttagccaggtggaacgcgaaactaaggatattgaatcagttgctcaaggttctgcctatctcagatgttgttgtggaagatgttcaagccaagtccaagaagaattgtaagaagtggaacctatgctttagtccgattgaagccggtaagaattggttctatactgaaatcaggaaacttggactgaagttgtatctcaaacaaggatacgaaaccaagattcttcgcgagaagtttaacttgaaaaaatcttcgcagaagagtaagcagacatttgggtctcatgcagttgatgcgtgggtgttagcagccgatgtggttggcgcaatcaagccaacctgtttggaattgatctattggataccgattaggttgcacagaagacagttacataggttcgaaccaacaacaggaggcttgaggtcgtcttatggtggaacaaggtcaatgggattgaccagaggaacattggtcaagcacatcaagtacggcttgacctacataggcggaactctgaagaacagagtttcgttgcatagcgttaagacgggtaaaagggtgacacagggcgcaaagatccaggattgccggatcttgaccaggatatcctggcggggcacgctcctcccacgaataaattcgtgggtttccgctacccccgcgccccacggagtttcatga

SEQ ID NO: 933 - DNA, 230 bp, Unknown
  GENOME_ACESSION: mgm4799991.3 MG-RAST
tccagatatcgttctgggttaaatttcccttcggagttgcgaagcaggcttagtgtttcgatcctacgaaacccatcggggtcggcgtgcccaggagaggtacgtgctagggaagtacacgaacgtccttgtagcccacaatgcttctgcaaagttttttgcctcctagtctactgtttagtctcgcttagccgttcacaagccccggtcttcaggccggggtagttgac

SEQ ID NO: 934 - DNA, 756 bp, Unknown
  JGI24025J20009_10017887
atgcaaaaagtatatgtattgaacaaagacggaacacctttgatgccttgtaaagaagcaaaggcaagacatttaataagagatggtagggcaaaagtagtaaggcgtaatcctttcacaattcgcttgaattgggattgtgagaaaaacactcaaacaattactttaggagtagatagtgggtattcgaagattgggttttcagctatcattaatacccaagaattaatatcaggtgaagttcagttaaggaatgatgtatcaaagaaactatcagaaagaagaatgtatcgaagaaacagaagaagtaaattatggtatagaaaacctagatttgacaatagagtatcaagtaaaaagaagaactggttagcaccctcaattcagcacaaattggatactcatatcaaaataatatataaggttagagaaatattacctatttcagatactgtagtagaagttgcttcatttgatatacaaaagattaagaatccggatattcaaggtaaagattatcagaatggagaacaaaagggctactataacatcaaggcatatgttaaacacagagataattatacttgccaacattgtaaaggaaagtctaaagacaagattttgcaggttcaccatataagaggaaaaaaagaaagggcaacaaacagaccagaagagttaattacagtttgtaaaacttgccatgagaaacaccacaagggaattattactattgctgttaaacccatcaagaca

SEQ ID NO: 935 - DNA, 300 bp, Unknown
  JGI24025J20009_10017887
gtcaatcgcccctccctaaaggaaggggcttgagtcgtgagacttgagggtaactggttgattagaaggcatagaaatatgcagaagttatcagtaaagttaaagaacacaccaggagatacttctctagtctcttgctctgtaagttctgtattaaacaaagaggaaactcttagtatgcagaacatagtactggctgataacaactccgaagagaacatacgcttatcagtgggcgggcctaaagccattacactgatatatatactaaataaaaaatgagaatctattatgcaaaaa

SEQ ID NO: 936 - DNA, 1443 bp, Unknown
  Ga0182027_10092596 JGI
atgttaaagcagcagttaagttggagagatacatgcacacctacggatgcttcactagtccgtggctctgtggcttcgtctttaaacagacccgaaagggtcagtgagcgaagcctaaaaacccaatttaacaactccgaagtggaccaaccccgcaaggggagaccggtcttgagagtaccagtcctaaacatgcgcatgcaaccgttaatgccaacaacacccacaaaagcaaaaaaactgctacgacaaggcaaagcaaaagtcattcaaagagcaccattcaccatacaattgctttacgctactggcgaaacaaaacagccaataacactaggcatagaccccggatacaaaaccattggattcagcgcagtaaccgccaaaaccgaattaatagctggcgaagcacccctccgcacagatatacccaaattgttaaaagaaaaagcaatgtatcgacgacaaaaacgtagccgacaccactggtacaggcaagcacgattcaacaaccgaaaaagaacagaaaaacagctaccgccaagcctacaacaaaaacttgattcacacatcagactcgcccagaaactgcaaagaattctgccgataacaaaagtaattgttgaagttgcagcttttgacacccaaaaaatgatgaacacagaaatcagcggagtagaatatcaacaaggaacattacaaggctacgaaatccgagaatatctgcttgaaaaatggggaagaaaatgcgcatactgtaaaaaacaaaacatcccgcttgaaatagaacacataattcccaagtcaagaggcggaacagatagcgtcaacaatctcacgttagcatgccatgattgcaaccaacaaaaaaataatctgaccgcagccgagtttggatacctagaaattcagcagcaagctcaagaaacactcaaacaaacgccattcatgaacgtcataaacgcaagaatcaaagaattacttaattgcgaaatcacttacggttacgtaaccaaaaacaaccgcattgcacaaggtttagagaaaacacacgtaaacgacgctttcaccatagccaaaggcatagaacaacaacgaagcttaacatatattgtaactcagcgaagaagaaacaaccgagcactacaagttaatagaaaaggcttcaaaccatccataagaagaaaaaggcacatcttccaaagcggagatttagtcagatacaaaaaagaattatgtatagttaaaggcgtcttcaactacgggatatgggcaaaattgatagattccaaagaaaaaaacttcaattcaaacgttaaaaacttgaggttgattaagtacggcaaagggctacaatttcacgctaagcaattcagccccaacatgaatgttggggtcttcttgcaaaatttagataaagtcaagaattgtggaaacgcttaa

SEQ ID NO: 937 - DNA, 229 bp, Unknown
  Ga0182027_10092596 JGI
gtcaactacctcgtcctgaaggacgaggcttgtctcgtgagggataaggtaagagttgattaggaggctttaaaaaacatgttaaagcagcagttaagttggagagatacatgcacacctacggatgcttcactagtccgtggctctgtggcttcgtctttaaacagacccgaaagggtcagtgagcgaagcctaaaaacccaatttaacaactccgaagtggaccaac

SEQ ID NO: 938 - DNA, 1326 bp, Human gut metagenome
atgtcggtttctgtatttgttcaggacaggaagcaccggtctctgatgccgtgccgacccgctcgggcgcgaagactcctgaagtcgggccgagctcgcgtcgtgagactcttcccgttcacgatccgcttggtggatcggcttctcgaagattcttccgttcagtccatcctcgtgaagatcgatccgggttcccgtcagacgggcgttgcccttgttcgagcggacgagaaggctcatcaccatgcgctcttcttcgtcaatctcgttcatcgcggcgaatccatccgtgatgcgttgacggctcgccgaaactgtcgccgtcggcgacgcgggaatctccgccatcgtgccccgaggtttctcaaccgcacgaagccgcagggatggcttcctccgtcgcttcgacaccgcgtggataccgcaaccgcatgggtggcgaagctcgtcaaactcgcgcccgttacggggatcgtggaggagctcgtcaagttcgacgcgcagaagctgcagaacccggaaatctcgggcaccgagtatcagcaggggacgctcttcgagtacgaggtgcgcgagtatcttcttgagaagttcggcaggaagtgcgtttactgcggagcggagaacgttccgctcaacatcgatcacgtggtcccgaaggcgcgcggcggttcgaatcgcatctcgaacctcgtgctttcctgcgtgaactgcaaccaaaagaaggattcgcaacctgttgaggttttcctgaaaaatcgccccgaagtgcttgatcgcatcaagcgccggctcaagacttcgctcgcgcacgcggcaacggtcaatgcaacgcgttggtcgctcttcaacgcgctcaaggcgttcggtcttcccgtcgaaacgggttcgggcgcactgacgaagttcaaccgccatacgttcggcgttcccaaagagcactggcttgatgcgctctgcgcggggcgggtgaacggggtgcactaccccgaggggatgggcatccttcaagtccgttgtacgggacgggggagctatcagcgcacgcgggtcgacaagtacggcttcccgcgcggctgcttgacgcgccaaaaacgcgttcacggattcgccacgggcgacatggtgaaggccgtcgtcccttcggggaagaaggccggaacctaccggggccgtgtggctgtccgtgcgcgaggttgctttgtcattcagacgcctgaaggcaaggtggacggcatcggttggcgtcattgccgactgctttcttttaacgacggatacgggtatgcgtggcttcgccccgcacctcattcctcctccgtctga

SEQ ID NO: 939 - DNA, 289 bp, Human gut metagenome
gtcaatcacccctgcctgaaggcagaggcttgagcgatcaggccggttgaccagtctcagtgatccaaaaggagaactacgttgcagttaggttacaagacccgccccggggtgcttcctcagctccgggctccggaaacggcagaagcagacaagatttgggtattcacgaaacggtctgccgttgcaatgccggactgcaacattggcgaggggaattcaacttctttgttgatgtcacgggggtaaccccgattaaccgtaaggtttacaaaacatgtcggtttct

SEQ ID NO: 940 - DNA, 885 bp, Human gut metagenome
gtggtaaggcgcacgcctttcaccattcagctcacgattgcgaccggcgagtccaaacagccggtgagtctgggtgttgatgccgggtacaaacatgtcggactttccgcatcaactgaaaaggctgaactttatgcatccgaagtcgaactgcggaaggacatcaccgatctgctctctgctcgtcgtgcgttacggcaatcccgccgtaaccgcaaaacgcgctaccgcgcaccgaggttcgacaaccgcatccgcaccaagcgcaaaggctggcttgcaccgtcggttgaaaaccgaatcaacgcgcatttgtcgcgcatagaagcggttctccgactgctgccgatcacgaagattaccgtggaaacggcgtccttcgacatgcagcggctgaagaatcccgacatttcaggaaaagagtaccaagaaggtgaacagctcggcttttggaacgtccgcgagtatgttctttttagagatgggcacgtctgtcggcattgtcacggcagatcgaaagacccggtgcttaatgttcatcacttggagagcagacgtaccggcagcgattcgcccgacaacctgattacgctttgtgagacgtgccataaggcgcttcaccgcggcgaaatcacgctgaaggccaagcgaggacaatcgttccgggcgcaagctttcatgggaattatgcgccgggaggttttgaaccgcctaaaggcgtcgtatcctgagctgaaggtgcacgaaacctacggctacttaaccaagcacgcgcggattgcgaacggcattgtcaagtcacaatggtgcagatgctttctgtattgccggcaacttggaagccgaaaggcctacgggcgcgaaattcatttctttcccagtaac

SEQ ID NO: 941 - DNA, 247 bp, Human gut metagenome
gtcaactacctcggcctaaaggccgaggcttgaaaaagcctctagttgactagcctcagtctgtcgttttgaggactacgttggttgggaatgcacaggcaccgcgggatgcagatcctagtcccgcgctctgcggccgatggttaaaagctctgagaggtaggagcggtgctgtcggcttgaaaccccctccaacattggcgaaggatcacaaccggtcgaaagaccgaggagacaaaacttgaga

SEQ ID NO: 942 - DNA, 1020 bp, Unknown
  Ga0066665_10044143 JGI
atgtttgtacccgttgttaatagcaaacacaaaccactgatgcccaccacagctgccagggcacggcgctggatcaagagcgggaaagccacaccgttttggaagcagggcatcttctgcgttcggctcaacgtcgagccttctgccagcaacatccaaccggttgctgtcggaatcgacccaggttccaaacgagaaggttacagcgtcgtgtccgccgcccatacgtacctcaacctgcaggctgataccgtggactgggtcatggaggcggtaaccactcgccgccagatgcgccggacgcgccgagggcgcaatactccctgtcggcagccacgctataatcgcttgcgaaacacaaagaagctcccaccttctacgaaagcccgctggcaatggaaactgcggctgtgccggtggcttatatccttatatcccatcgcagcctttgtggtcgaagatatcagggttcagacagcaggcaagcggcgatgggatcggagtttttctccgcttgaagtcggcaagcggtggttttatgcggaactagcgaggcttgccccagtgttgacgaaacaaggatgggaaaccaaggagcttcgagaccaacttggcctcaagaaaaccaacaagaaaacggcggaggtgtgggaggcccattgcgtcgacgcctggtgtctggctcattggtgggtaggaggcaaactcactccggacaatatccgcttgcttgcggtgacgcctttgcactggtatcgtcgacaattacaccgacgcgaaccagaaaagggtgggaaacgcaagccctacggaggcaccatgagtctgggcatcaagcgtggcaccctggttaaacacccacattatggacttgtgtatgtagggggcaccatgcgcgggaaactcagcctacatgcacccgagagcggtaggagactcacacaaggggccaaacactccgaatgccatcttatcaagctgttacgctggaggacgcgactcctcccaatccgcttatga

SEQ ID NO: 943 - DNA, 241 bp, Unknown
  Ga0066665_10044143 JGI
gtcaagtaactgctcccccagaagggggcttgtgagcacgaacgactggccatcgggaggcccacaagaccaaacacgagactagcttgcccaagctctggctacagggcacttgaagggaactgaaccatctgggtgtggcagcccgcaagacgatacgaatgcctccctagtttgtatccgctctggtggtcagcagcgaagggaacgtagaaactccgcaaggaggcttatcgcatat

SEQ ID NO: 944 - DNA, 1185 bp, Unknown
  Ga0216255_10000297 JGI
atgagagtttttgttattaatcagcatggtgaagcattaatgccttgctatccccgaaaagccaaaatactgcttagagcaggaaaagcgaaagttatttctcgttcaccttttactattcaactgaaatacggctcaactggttataaacaggatttaactctgggcgttgacacggggcataacgaagttggcttgagtgttgtttcagaaacaaaggaagttttttcagcggtggcttctatgcgaaatgatatttccaagaaggtgactgagcgaaaaatgtaccgtagaaacagaagaaaccgattgaggtatagacagcctcgttttctcaacaggaaagccagcaccagacaaggtaggcttgcaccttctgttcaatggaaagtggatgcccatgcaaaattgatccgtcagttaaaaatgttattaccaataacaaaggtggtattcgaaacgggtacgtttgatacccataagctaaaaaatcctgacattaagaatgagcaatatcagaaaggcgttcaatatggttttgagaatgtaaaggcttatgtcttaagtcgtgatggctataagtgccagtgtgggcaaaaaggatgtgcctctacattagaggttcaccacattaaataccgctctcaaggtggttctgatgcacctgaaaatctcattacattgtgttcaaaacatcataaggcactgcatgacggaaaattgagtctgaatattacaaagcacaaaagtttaaagtctgccactacgatgaatgtgatccgttctcagttgttgaagttgtttcctgatgcgatagaaacttttggttatgtgactaaagcaaatcgctatcaacatgacatcgataaaagtcatagcaatgatgcttttgtcatagcgggcgggtcttttcaggaaagagagttagagcggatggtgagctttaaacgtaagaataaccgttctatccagaagaaccgaaaaggtttttctccttccattagaaaacaacgatatgcaatacaaccaaaagacctggtgaattttaaaggaaagcaataccaggcggtaggcatacagaacaagggagcatacttgaaaatgtccgatggacttaaagctattgtaaaatccatgaagcaaattgaagtggtatttcatcaaaaaggtattatttacgcatga

SEQ ID NO: 945 - DNA, 283 bp, Unknown
  Ga0216255_10000297 JGI
gtcaactacccactgagctgaagactcaggggcttgaatcgtgagattcgagatagcggtagcaatatcgtaataggtgattagcctaagtgcttagagcactacgttgttttagttatagcaccctcggatacctcccaagtccgttgccctgcttcttggtattaaaagagttcaacgactcggtgtactaagactgacaagctattacaacattggcgatgggaatcaacctcgtgagaggattagtttttaattaactatttaaggttttaaaatgaga

SEQ ID NO: 946 - DNA, 357 bp, Wastewater metagenome
atgttagtatatgttttaaataaccaaggaaccccaattatgccttgtagttcagctaaagctagaaaactactaaaagatggaaaagctaaaatattaaaaggaggaattagaaaattaaatcaagctaagtatgatatacataactttagattgtttgataaggtaaaatatgagaataaagaatattttatatttggtagaagaaatagtgggttttttgatattagaaatttaaaaggcgaaaaagtcaacaaaggtagtattggatataagaatttaaaattagttttaccaagaaaaaatatattaattgagaggagagaaggcaattcctcagctaagctaaagacttag

SEQ ID NO: 947 - DNA, 259 bp, Wastewater metagenome
ttataagtcaactaaccccttgctaaagcaagaggcttgaaaaagcctaagttgaccagtctttgtggggtttaaaccccactccgttattttagttatcataccttggtgtgttttgtctagcaccatgctctatgtgggcaacgtaaacagttctgagaggtaggaacagtcgacccaatgtgtatgtctcacatacaagctattataaccaatctaagacaacattacccgaaaggagattatatattttatgtta

SEQ ID NO: 948 - DNA, 852 bp, Unknown
  Ga0306925_10047498 JGI
gtggcgtcagcggcgcacacgtacctcaatgtgctagcggatagcgtcgattgggtaaaagacgccgtggaaacacgtgccatgttgcgtcggtcccgcagaaaccgaaatacaccttgcagagcgaatcgcaaaaacagagctaaatgtccatttcctccaagcaccaaggcgcgctggcaacttaagctgcgcgtagtcgatcgctttcgccgtatgtaccccattaccggttatgcggttgaagacataaaggcatctactcacgggaagaacgaacgctggaactcggcgttctcgcctttggaagtaggtaaaaagtggatgtatgccgagttgcgcaaactcggcaccctgacgttaaaggctgggcacgagaccgcagaactgcgcaaggcgtttggtgttgtaaaaggtagcgataagatggcgttgtgctttgccgctcacaatgtcgattcctgggtattggccaaggatgcgttgagagcggcaggaacgccggagaacacgcagcttcttcactgtaaagcgcttcaattcagacgccgagcgctccatctccagaacccggcaaaatacggagtgcgtcgtagtcatgggggtacgctgagcatggggtttaaacgaggatcgctcgttaaacatccgaagcacgggctctcgaccgtaggcggaacgatgcaaggacgagtcagcctgcacagcttgcacgggaaaaggctttgccgaaacgcaaaacgcgaagaaacgacccttttaaaacgaacaaccttaatttttcaagccgtccgcaggaagggcattcctcccatgccggaaggggtgggtttcctgcctaaatctctatga

SEQ ID NO: 949 - DNA, 281 bp, Unknown
  Ga0306925_10047498 JGI
gtcaacgacccacgaccaaagccgtgggcttgagggagcacgaaacaaacgatgcgaactgaagttaaatccgagactagcttggacaagattcgaggcgactcgggtcgtttgaagtcaactgagatcactgccggtggtacggcgcaagacatgcggggtgcttcccaagctccgcctcaatctgtggtacagcagcgaagggaatgcatacacagatacaggactggcttaccgcgaaatcctgtagttcccgtccttgctcaggatggcgaaccatt

SEQ ID NO: 950 - DNA, 813 bp, Human gut metagenome
atgacaaattatgcttttgtattagatactaatggtaaacaattagcaccaacaaaagaacaaaaagcatggtttctaattcgtaaaaagcgtgcaacattggttagtaaatatccaatggtaatacaacttaataaagaaattccagatgaagacatctgcaaagataaaattcgttttggaattgacgatggtggactccatgtaggtgttgcattagttcaaaaatgtcaaactaaaaataaagtattgtttaaaggaattattgaacaacgcaatgatgtaaaacatcttatggaagttagacgtgaatatagacgttatcatcgttatcacaaaagatatagacagaataggtttaataatcgtagttcttctaaaagaaaaggaagaattgcaccaagtattttacaaaaaagacaagctataataagagttatcaaccaactaaataaatggataaatattactgattattggttagaagatgtatctattgatattagagcattgacggatggttataaatcctgtggttggcaatatcagaaatctaatagattggatgaaaatattaggaaggctgttattcttagagatggttgtaaatgtatggaatgtggcagatcaaattgtaaattagaagtacatcatattaaaccaagaagattaaatggttctaatacattaagtaatcttattacgctatgtaaaacatgtcatcaaaaaacagagggcaaagaagaacagtatatgaaacattattttgatatattgaaatcttctgataagaaaaatcttaattacgcttaa

SEQ ID NO: 951 - DNA, 289 bp, Human gut metagenome
tagataaacatactcaaaagtggacacaataagtcttttgagcatggattaacaataggtctcaaggctaagtgactgctactatggaaacatatgttgcagatatgaactacgttgtatagtaaggtaaaaacacacctgtaaatgtaatcttcagtttgctgctctgtgagtgccaatcaagaaacatagctaatgtcctgctatgataacagagaaatacatgtcctctatatgacattgccaagaagaaaaattctccgcaaggaaggtgtcagaaatgacaaat

SEQ ID NO: 952 - DNA, 1443 bp, Mine drainage metagenome
atggaaaagaggtgcgaaatggcggtttatgtactggacaaaaagaagcaaccgttgatgccgtgctcggagaaacgggcacggctgctactggagcgtggacgggcggtcgtgcataagatttatccgttcaccatccgtctcaaggaccgggtcggtggggcactgcagccgctgcggctcaaaatcggtccggccagccacaagaccggaatcgccctggtgcgcgaatccgagacggtggatccggtgacgggagaagtacaacgggtggagcacgtgattaacctgattgacctggagcatcggggcgggctgatcagcaagaagctggaacagcgttccaacatgcgtggcggtcggcggcaccggaaaacgcgttatcgtcccgcccggttcaataaccgcagccgtccggagggttggctgccgccaagtctgcagcatcgggtggacaccacggagtcctggtgcaaccgattaacgtctttggcgccgattacggcgatcagcaccatgctccaccggttcgatacgcagaaactacaggatcctgaaatatcaggcatcgagtatcaacagggcaccctgttcggatatgaggtgcgcgaatacctcctggagaaatggggacgcacctgcacctattgtgacgccgatgacaaacccttgcaggtggaacacatcctggccaaggcgaatggcggcaccgataggatcagcaatctgacgttggcctgcgagccctgcaaccaggagaagggcaagctgttcctgcccgagttcttgagtacgggcaaaaagcggttccgccgctttgaacggaacgcgcggcatttcgctacgacggggaaaggcaacattgatgcaaagaagctcgcagaacgcaaacagcacgaggtgacccgattggcgcgcatacaggcgcaggccaaggcgccactcaaggatgtggcagccattaacgctacccgcgccgccgtactgaggatgttggaaggcacaggattaccggtggagatcagcaccgggggtcgagccaaatggaatcgcacccggttcagtataccgaagcggcacgccctggacgccgcctgcatgggtcaggtggatcgtatcgaggattgggatcgtccctattggcgggtgcattgtgacgggcgtggtcagtaccagcgcaccaatctggacaagaaaggtcgccgtgttggttttttgccgcggcagaaacagcaccacggatttcagacgggggacatggtgcgggccgaagtggcgaatggcgtacataaaggtatccatatgggacgggtggccgtgcgttcgtcggggtcattcaagatgcgcacgaaaactggtctgcacgatggcgttaaagcggaagattgccggttgattcagcgttcagatgggtacagctattttcgggagcacgttgcatga

SEQ ID NO: 953 - DNA, 321 bp, Mine drainage metagenome
gtcaattaccccgccctgaagggcggagcttgcaaggcggtacgcaggctaggttgatcatggggaccgtgtaacgtcgtgagacgttggtagacgtttataacaggtcgtacagacgcactccgggatgctgcctcagttccgcgacactgcaaggttgggctcatgctgcggaaaggcaaagccgcgaaggaccaatcgtcaccgcaaggtgagagccggttatagaccccccgaggggagacatttgtacaagttgttaccgggcccgtaagggttgcaccccgcaagggcgttatggaaaagaggtgcgaaatggcg

SEQ ID NO: 954 - DNA, 675 bp, Unknown
  Ga0401356_0239 JGI
atgtctaatcttgttttcgttctagacactaatataaaaccactcaatctctgtacaccgggggttgctaggggtttactcaaagccgcaaaagctaaggttttcaggaggtttccgtttacgattattctgaacaaaagtcctgatgtcttaaaacggattttggcacaagccaaacgacccttgaaagacgcagccgccgtcaactctacccgatgggctttgttgaatcggctcaaggaaatcgggttacctgtctcaacaggtagtggtgggaaaactaagtacaatcgcattcgtttgaagttacataagcggcactatatcgatgcggcttgtgttggggatgttgagcaattagaaattgcaacgaatcaaccattgctcatcaaagctacagggcatggaactcgtcaaatgtgtcgcacagataaatttgggtttccgagtcggtacgtccccagaaataagtttgtcaaatgctttcagactggtgacattgttaaggctgtcgtcacctctggaaaaaaggttggaacttatgtgggtcgtgtagccgtgcgaacaactggcagcttcaacatttcggcagctaatggattgattcaaggcattagccacaaatattgcagcctagtacatcggaaagatggataccaatacagcttcttctaa

SEQ ID NO: 955 - DNA, 244 bp, Unknown
  Ga0401356_0239 JGI
ggctataagccgggggcttgaatgaagcccacacctgaccagaagacccgttgaaaactggtagccgttattagcaagagtttaagttctcaccttgggatgcgtgccagttccaagctctgaaacctcagcattaaacaggtctacaagggttaagccagtgtgttgaggatacgccacctaataacaacttcgaggcaaacgttacgagtttttcaggacagacgcaacaatgtctaatctt

SEQ ID NO: 956 - DNA, 1245 bp, Human metagenome
atgccttgttctccggcaaaagcacgccttctgcttaaagagaagaaagctattgtgaagaggcgaacgcctttcactattcagctgacgattgcgaccggcgaggccaaacagcccgtgagtctaggtattgatgccgggtacaaacatgtcggcctttctgcatcaacggaaaaggctgaactttatgcatccgaagtcgaactgcggcaggacatcaccgatctgctctctgctcgtcgcgcgttacggcagtcgcgccgtaaccgcaaaacgcgctaccgcgcaccgaggttcgacaaccgcatcagcaccaagcgcaaaggctggcttgctccgtcggttgaaaaccgaatcaacgcgcacttgtcgcgcatagaagcggttcttcgactgctgccggtcacaaagatcaccgtggaaacggcgtctttcgacttgcagctgctgaagaatcccgacatttcagggaaagaatatcaggagggagaacagctcggcttctggaacatccgcgagtatgttctttgcagagacgggcatgtttgccagcattgttacggcagatcgaaagacccggtgcttaatgttcatcatctggaaagcagacgtacgggcggagattcacccggcaacctgattacgctctgtgagacgtgccataaggcccttcatcgcggtgaaatcacgctgaagccaaagcgcggacaatcgttccgcgcggaagccttcatgggaattatgcgctgggaggttttgggccgcctgaaggcgtcgcatcctgagctggaagtgaacaacacctacggctatcggactaagcacgcacggattgcgaacgacatcgctaagtcgcattgtgcagatgctttctgcatcgccggcaacctcggcgccgaaaggctcggcgaattcttcttccagaagcagacgcgtcggaacaaccggcagattcataagctttccatcctcaaaggcggcattcgaaagcgcaatcaggctccctatgagatcaaaggcttccgcctttttgacaaagttgcctgccagggagaagaaggcttcattttcggccgtcgatcatctgggttctttgatgttcggaaggttgacggaacccgaatttcggcaggcatcagctacaagaagctgcatctgctggaaaagagacgaacctatttaacagaaattcgaaaggaggaggtgcttcctcccctgcctgaaggcaggggtctccgcgcctaa

SEQ ID NO: 957 - DNA, 247 bp, Human metagenome
gtcaactacctcggcctaaaggccgaggcttgaaaaagcctctagttgactagcctcagtctgtcgttttgaggactacgttggttgggaatgcacaggcaccgcgggatgcagatcctagtcccgcgctctgcggccgatggttaaaagctctgagaggtaggagcggtgctgtcggcttgaaaccccttccaacattggcgaaggatcacaaccggtcgaaagaccgaggagataaaacttgaga

SEQ ID NO: 958 - DNA, 1326 bp, Unknown
  Ga0213833_1005875 JGI
atgccaaaacaaaaacatagaaaccttgggcagcaaagagtccttgtgctttcaaacacaaagaagccgttgatgccttgccatcctgcaagggcaagacgcttcctgaagcaaggaagagctgttgtctatcgacgtttccctttcaccattttgttaaaagaccgtgaagacggctacatacaacccattgaatgcaagattgatcctggtgccaaagagacaggcattgcattcgtagcctctttcaagcgtgggaacgtttgcatttgggccgctcatcttgaacacaaagggtttcaagtcaagcaagcactcgaaaagcgaagacactttcgaagagcgagacgcaatcgaaagacccgtcacaggaaggcccgctttgacaatcgcgcaaggcccgagggttggttgcctccaagtctacaaagtcgtgtggataacatcacgaacttcatccgtaagtatcatcgctttgttgtcttcactggcttcaccgttgagcatgtcaagtttgacatggtgctaatgcaaaacccagaagtgtccggtattgagtaccaacagggaacgcttcatggttacaccgtcaaggaatacttgctcgagaaatacaagcgttcctgttgttactgcaacaaaacagatgtgcctctggaagtcgaacatgtcgtacctaagagtaaaggcggctcgaatcggattgcgaatctggtgttggcttgtcgcaagtgtaacgaaaagaaaggcaccaaggatattgaagtctttctcaggaaaaagcctgaacgcttgaagacaatcaaagcaggtctcaagaagccactccgtgcagcggctgcggtcaatgccacacgcaacaagattgttagagagcttcgagccttcggattgccagtcactacgacaacaggcgcacaaacaaaattcaaccgaaaggttcaaggctaccccaaagcacactggctcgatgctgctgtcctgggagaacaaggcgaatctgtcgaattactctctggttctatcttacacatcaaggccatggggagaggttcacggcaatcttgcaagccagataaacacggcttccctcgtacaaagccaaaggcaaaagcaaagaaagtcaaagggtttcaaacaggagacattgtcaaagctgttgtccctacaggaaagaaagtgggtacgcacatgggtcgtgtcgcagttcgaagtagcggctcatttaatatcaaaaccaaggacaaaaccatacaaggcatcggttatcaacactgtcagttattacacaaaatggatgggtacgcctatgactttaccgactga

SEQ ID NO: 959 - DNA, 330 bp, Unknown
  Ga0213833_1005875 JGI
gtcaacgaccccatggctgaagccaggggcttacgagagtcagcccgtatgttgaccagggtcagtcgctcaaaggcgactacgttcgagtggaacatataggtaccgtatggttcttctccagccatacgctctacgatagatggttaaacggttacggggtgatgccagtgccatttgtagacaaaacccactcagaacattcccgaggagacctttacccgcgaaagcggtgaacgttagacctcaatcattgaggtcacttgataacaaggagttggcacaatgccaaaacaaaaacatagaaaccttgggcagcaaagagtcctt

SEQ ID NO: 960 - DNA, 1482 bp, Unknown
  GENOME_ACESSION: mgm4547164.3 MG-RAST
atgacaccatgcccaaacacaagcaaggaggcatcaatgcaggaatacatttatgtgttggcgaaagatggcaccccattgatgccaactttaaggaaacgccacgttgagaaccttattaaacgtgacaaagcggtcagagtggaacttgtaccgtatgtcatacagctgacatatgagggccccaaagaaacacagccgttatatggaggtactgaccccggaaggaccaatatcggaaatgccgttatgaccaaaggcggggtagttgtgtacaaagaccatgtgaccaccagaaataaagacatagcaaaactgatggcggaacgaaaaatgcatcgccaacaatcaagacgaggtgagcgtctggcacgcaaacgtcttgccaaacgtcttgggacaacaaccaaacaccttgagagaaggattcttccagggtgtaaagaaccggtaatgttcaaagatattagcaacacagaagcacggttcaataatagaaaacgtgctcccggatggataactccaagtacaaggcacatgatacatactcatatcaatatgattaagcgaatctgcaaaatactgccggttacatattggacacttgaaacgaataaattttcattcatgttaatggaagacggaactgtacgtgggagagacttccagaatggacgacttaaaaactttactgatgtgtacgaatatgttgggaaccaacaaaatggaaaatgtatttgctgcggaaagccaatagaacattaccatcatatcgtaccaagacatagtggaggttcaaaccgtcctgagaacattattggcgtatgcaaaacatgccatgaggaaatacatactggacaaagagatatcacagccattggtgagcataagaaatatgcagcactttcggtattaaaccaggcgataccgttcattgaaatggaactatcaaaaatattcggtaataactttatgacttgtacgggatatgaaacatacgaactgcgtcaacgtttcgccattgcaaaagaccacgacaacgatgccgtatgcattgcatcctaccaggcatccccagattttatcgaggatacacaattaactcatcaagttatgcagttcagaaggcacaaccggcagagaattaattcacaacgtgaacggacatataagcttgacggcaaagccatagcaaaaaatcgtaagccaagatttgagcaaaaagataaggcgttgtctgatttaaatttgtcaccggctgaaatttcaaggctgacagtaataccaagtcgtcggtattacaacaatatggaccgacttatgccgggaaccgaattcttgtatgaaggtcaacgctacatcatgagcgggcagcactcgaacggttctttgctgagagcggtaggacaaggtaacagagagttcaaagcttccaaatgtcgtgtcataaaacaaaacaggggacttgtatacgtctcctaa

SEQ ID NO: 961 - DNA, 238 bp, Unknown
  GENOME_ACESSION: mgm4547164.3 MG-RAST
gtcaataaccaatgactaaagtcacgggcttgtaagagctgtcatgtgcaattttagcatgttcgtgatggcggaagtggattattgagcagagctatgacccggtattcaccagtggatggaactagtccgctgctctggttaaccgggccgaggctaaggaaacagttttatggcatggaagagccttacaagctatgacaccatgcccaaacacaagcaaggaggcatcaatgca

SEQ ID NO: 962 - DNA, 1200 bp, Unknown
  Ga0209345_10000187 JGI
atgttagtatacatactaaacaaaaataatcaacctttaatgccttgcaaaccagcaaaagcgtctaagcttttgagggagaaaagggcagaagttgtcaaaagaacaccttttactattaaattgaaatatggtagttcgggatatgttcaaaaagctatattaggaatagatacaggatatcaactcataggtttttcagctattaatgaaaaacaagaactaatctcaggtgaagttaaattagattgtatgatgcctaaacgcttacaggatagagctatgtacagaaaaagtagaaggaataggttatggtatagaaaaccacgttggagaaataggattggttcaaaaaagaaaggctggctacctccatccattcaaagaagatatgaaacacatttaaaacttatagaactgattaaacaaatgttacctatacataggattataatagaagtcgggaattttgatatacaaaaaataaacaatccggatattcaaggaaaagaatatcaacaaggcaatatgtatgaatatcaaaatattagaagttatcttatgagaagggaacatggaaaatgccaattatgcgggaaggaattttcaaaaacaaattcatcacatatgcatcatattataccaaaaatgaaaggcggtacagataaaacaaacaatctatctttactacatcaaaaatgtcatattagattacataagaaagggttgtataaccaattgaaaaaaaacaagcaatacaaagattctacattcatgaatatcgtcaaatggaaatataaaaaagatattgattgtgatataacttacggagcatatactttttctgatagggttaaaataggaatggagaaatctcatgtgaatgatgcttttataatagctaaaggtgagatccaatccagatgtcattcttttaatatagagcaaaaaagaagaaataatagatgtttacaagtgaatagaaagaaatttaaaccatctataagaaggaaaaggtataaacatagacctggagatttagttaaaatcaatggaaatttatacgaagttaaaggaatacattcctatggtactcggattagattattagattcatctggaaatattataaatatatctactaaaaaattagatgattggatatatcatcaaaaaactttgatatggagagcagcttga

SEQ ID NO: 963 - DNA, 250 bp, Unknown
  Ga0209345_10000187 JGI
gtcaactaccctttactaaaggaaggggtttgaatggtaacattcaacgcaagagttgattaggaggcatgagtaattatgcagcagtttggaaatgaaatacatacacaccttggagatgcttcaccagtcccaagccctgtgatttgatattaaacagagattataggtctcagtgtatcagatttaaaaactttccaaacaactccgaggtgaatcaatccatggatagggagtatactttatgtta

SEQ ID NO: 964 - DNA, 1332 bp, uncultured Clostridiales bacterium
atgttagtctatgtaatcagcaagggcggacagcccctcatgccgacatccagatgcggcaaagtccgcaggatgctaaaacaaggcaaggcaaaagttattaagcgctgtccgtttaccattcagctgctgtatgaacctgaaacagccgttatccagcctgttgaggtcggtgacgataccgggtcaaagcacaacggaatatcagcagttgcagtctatccggacggcagaacaaaggaagtctatgcatcagaggttcagatgcgtcaggacataacgaaaaatctttctgtacggcgtgagatgcgccgcgcaaggagaaaccgcaaaaccagataccggaaaccaagatttgacaaccgggtacgatccaagcacaaaggctggctgccgcctacagtggaaaacaagatccagacacatcgtcatgagctgctgtatgtgtgttcaatccttccggtgaccaaagtaacgatagagacagcatcctttgaccttcagaagctaaaggccgatctcgatggcttaaagcaaccggaaggcactgattatcagaaaggcgagcagttcggtttctggaacgtcagggagtatgtgttattcagggatggccatatctgtcagtgctgcaagggcaaaaggaaagatcccattctaaatgttcatcacattgagagcaggcaagccggcggcgatgcgccaaataacctgataaccctgtgcgagacatgccataaggcataccatgccggaaagatcaaactgcctgcggatatcaaacgcaaagcaactttccgggatgccacttttatggggatcattcgatgggccttctataacgtcataaaggacgaacttggcaccagaggcatcagtgtcaggatgacatacggctatctgaccaagaataccaggataacaaataaccttcaaaagacgcactgcattgatgccaggtgtatagcgggatatccggaggctgatccattaggctattacttctacaaacagaaaataagatgccacaatcgtcagatccacaagatgaccataggcaagcacggcatcaggaaagccaatcaggcgccttatctggttaaagggttcagacttaacgatatagttacagctaaaggcagtgaatggttcgttcacgggagacgtagtaaaggatcgtttgtactggcgacattaaacaatcagaagttggaaatctcaccatcaaaaataagatttgtttctgtttctgacacatatcttacagaaaggagaaaagcgctccccaccctccctatagaggaaggggtacccgcgcttgtgtgctcttga

SEQ ID NO: 965 - DNA, 314 bp, uncultured Clostridiales bacterium
gtcaatcacccaccacttaacctgacggtttgaagtgggggcttgcaaaagctctgattaactagcctcagtgcaacggcccggcgtaggccggattccattagcactacgttgtcccagtcacaacacctgcgagcgttatgcctaactcgctgctctgttgtccgttattaaatgttctgatgggtaggaactgtgtggcggatctaaaaagctctgacaacattggcgaaggcatcattacggcccggtatgtgccggcttaaagcgttaaacatacctattctacggaaaggagccgctatcagatgtta

SEQ ID NO: 966 - DNA, 1509 bp, Sediment metagenome
gtgcgttgccagctccaggccctgtcgttcggcagtaaacaggcatacggggtcgaagccagtgtgcagcacataaaaagcctggataacattggcgaggcaaacattaccccgaacgggaggctctttatgagcaaagtctttgtgcttgataccaagaaaaggccgcttctaccttgccatcctgcgaaggcgaggaaactgcttaagcagggaaaggcagctgtgtttcgatactatccctttaccatcatcttgaaaagggaagttctcgagccagcactgcagccattgaggttaaaggtcgatcctggaagtaagatagccggtcttgcagtagtaaatgatgcaactggcgaggttgtgtttgcagctgagatccagcatcggggagatgagattaaagatagtctagatacccggcggacgctccgaagggcacgcaggaaccgtaagacgcggtatcgtgcaccacggtttttaaaccgcaggagaagagaggggtggttacctccttccctggagagccgggttgccaatgtggtaacctgggtaagtcgtataagaagatactgtcctatccaatccatctcgatggagctggcaaaattcgacctgcagaagctggagaatccagaaatccagggggttgagtatcagcagggaaccctctttggctatgaagttaaggaatatctgctggagaagttcggacacaagtgtgcctattgccacgggaaatctggggacccaatgcttgaagttgagcacgttatacctaaaaatcctaaacatggtccgaaaggcacagaccgaataagcaacctggttattgcctgtgagacctgtaacaaagccaaagataacgatcaaccggaagaatggtatgcacgcttacaggcttcggaagacccgcttgaccaggagcgtgccaggaatttcccggctgttatgcaacagcttaagcaacctctaaaggacgcgactgccgtgaatgcgacaagatgggttctttaccggcaattaaaggatatgggactgccaatggaagccggctctggcggcagaacgaaatataataggtcaaaattaggtctaccaaaagctcactggatagatgctgcgtgtgtaggcgtcagtaccccagagcagattagcattaataaagttgtagtcttggagataagagctgtagggcatggcaagcgccagcggtgcgggaccgacaaatatggtttccctatccggtatgcgcctaaagttaaaacatttatggggtacaagacaggtgatttagtaaaggcagtaattccgaaaggcaaatacgccggggttcatatcggtaggatagccatacgacataagccaagctttaagctaaatggcttcgatgtgcatcctaagtacctgcggctccttcaaggggctgatgggtacgaatatgttttgaaaaggaaaagcgacgtctcctccccaggcataaatgccggggctcccggcgtcgcatga

SEQ ID NO: 967 - DNA, 254 bp, Sediment metagenome
gtcagctaccccacgcataaatgcgggggcttgtgatgagcaagcccggagctgaccagcctcagccagggccgtaaggccatcgggctacgttatccaggtcatgacaccctggggtgcgttgccagctccaggccctgtcgttcggcagtaaacaggcatacggggtcgaagccagtgtgcagcacataaaaagcctggataacattggcgaggcaaacattaccccgaacgggaggctctttatgagcaaa

SEQ ID NO: 968 - DNA, 1449 bp, Unknown
  Ga0172379_10011290 JGI
atgatttactatatcgaagattgtgatggaaatgtaggacacccgacgaagaaacatgatatgattcgtcgatggttaaagagtaaaaaagcgaagataaagaagagatcgaaagactggatgttaatcaaaattcacaagaagattgatcctgagaagactattccagcacaatttcgtatcggattagatccaggatacgaaaacgttggatttgcggtcttcaagttgactgaaacgaaagtggaaaagatacttgaaggagaagctaagttacgaaccaaacaagtgacagagaacttgactgaaagaaagatgcatcgacaaaatagacgccagaacagacgaaagaatgtgcttcgtaaatttgactcatgtaaatttagacaccctatttggaagaaccgtaagaagcataagtttcaaccaacacaaatacacttaattcagtctcataccaacatactaaagaagatttttcaactagtacctctagatgaaagtcatgtagtagtagaatatgctaagttcgattcacaaaagataaacgatccgagtatcaagaactatcagtatcaaaaaggattgcaatacgggtacgaaaacgtgaagaactatgttcgagcaagagacaaatacacttgtcaaatctgtaagaagaagaagtctgttgatcttcatgttcatcacatcttacctcggtctcagcatggaacagatattcctaaaaacttaatcactctttgtaaaccttgtcacgatagagttcataagggtcaagagaagtgtacaaaacctaaattgaatacttttgtcgctagtggagtactgaattcaattatgaaagagctttatgaaatcataagctcggaagtgagtgctagtaagacttacggatatgttactgatactcatcgaaagagtttaggactagagaaaactcattgcggtgatgctagtattatcgccttttgtgacgaagacaacgtatttgagtatgacggtgagtatatcgacaatacaagtcatatgtttttgcaacaatttcgtcgacataatcgtagttttacgaatcaagttgaagatcgtaagtataagattaatggtagtgttgttgcttggaatcgaaatcgacgagaaggacaagataagaaaaaaccatcattaactgagttacaacaagaatacggatatcacaagattcgtgttagtcctggaggtataaaatcacgacgaaataataaagatatgttatttcgtccaggagacatgataaaggtagcaccatcaaaaaagaccgagactttcgctagttacatcgatatctgtaaaggttggttatcgacacaaggaaccatatcaggagtaaactcgattaagaatataccaaatagatatgtgagcaagaaactcaataatggtggtctcgtaatcgataataaattttga

SEQ ID NO: 969 - DNA, 266 bp, Unknown
  Ga0172379_10011290 JGI
gtcaattacccagcggttaaagaccattgggcttgcgagctagtatagtcgcaatgccgtttacgggattgaacagacgtagtgactaacgattcaccagcgggtgccactcccagctcgttgctctggaggtagtgagatctaatctcaagtcctcattgctagctattaggtaacgaagactagtattatcgttagccaagtcgagggagacttatttttgtgcatgcacaaaaccgatcaaggaacacaaacatgatttacta

SEQ ID NO: 970 - DNA, 987 bp, Unknown
  Ga0120380_1006999
gtggcgaagagcaccaccctcgcaagaggagaatccggcggttctatgaccggggaagtaattcacgaaaggagatacaaagtgatggcatacgttgcagtcctgtcagcatctggaaaatcgctgatgcctacaactgcatacaaagcacggaaactcttaaagagtagacgtgcaaagatctacagctacagaccgctgttcaccattcagctgcaggaccgtgaagaaggtgctacacagcctgttgagctgaagatggataccggtgcacagcatatcgggatcagtgtctgctctgaaaagcacgaatattggaacaggcgctacgatatgctgcctgacgaaaaagaaatgcatgatgaggcaagaaaaaaccgccgtaacagaaggcaaaaacttcgttatcgcgccacacgcttcgataaccgcactcacggccataatcgcaaggaagataagtggtttgccccttctttgaaacataaagaaaacatccacattcagcttgcagaaaagatctgtgcggtagtcccggtgacagacgcttatttcgagatggggcagttcgatattcaggtattgaaagcctatgaagcaggcaagcccattcctgtaggggacgactaccagaagggtgagcggtatggttatgccactcttcgcgaggcagtctttgcgcgtgacaattacacctgtcaggtatgcggcgccaaactggatgacaagcaccatccgattttgagaatgcatcatatcggctattggaagcacgatcattccaatcgcatgagcaacctgatgaccgtttgcaccaaatgtcataccgcagcgaaccataagcccggaggaaggctatatggtctggagccagagcttccaacattcaagggcgccgcattcatgaacacggtgcggtgggatatgtttgcacagctgaaaaaagcattgccgaatgtcagatgccacatgacatatggcaatgct

SEQ ID NO: 971 - DNA, 261 bp, Unknown
  Ga0120380_1006999 JGI
gtcaaccaccccgcccatttacttcggtaaatggacggggcttgcggggaccagaatacccccgtaagcccggttgaaaagccagttacatgttgcggaggaaatatacaataggcacttcggaacgctgctcaaattctgaacactgcgggcgtgcattaaacatcctataggggaagggaagtgtgtacgtctcggcggactgacagcaacatcgccagaatgccgtaaaaccctccgataacagtggcgaagagcacc

SEQ ID NO: 972 - DNA, 1224 bp, Unknown
  Ga0256407_10008120 JGI
atggtgtatgtattgggacaaaataatttacctttaatgcctacagataattataggaaagttagactattattaaaggaaaagaaagctgttgtcgtaaaaagaacaccgtttacaattaaattattacattgtactaatgtatataagcaaaatatttcattaggaatcgatcctggaagtaaaagtattggcttatctgcaacaacgtcgaacaaagaaatttttgctggaacggttatattgagaaacgatgtgactaaactgatttcaactagaaaagaacatagattatctagaagaagtcgtaaaactaggtatagaaaagaaaggtttttaaaccgtaccaaaaatcagaaacctggatggattccacccacatatagacaaaagcttgatgttcatcttaagataattaatatgataaagagtattttacctataactaatttgtgcctagagttaaccgtatttgatactgccttagagcctacgaaatgtagtacatttagacggtctgttttaataagagataattacgaatgtcaatattgccatgggtcttctggagataaaactttacaaatacatcatattgaaactagacaaactggaggaaactcttttggaaatttaataacattatgtaaaacctgtcatgctaaatatcatagaggtgaaatagatatctcacaaacaagaacgaaatccttaaggcacgagtcatttatgaacattttaaatactagattagataagtatttaaaactagagggatatgataatatagacataaccaacggcttaaatacatataatactagaataaagtacaatctcccaaaagatcattcggtagatgcaagatgtattagtggaaatccattagctataatgtgtgatcatttttatatctttagatcagtacgaagacgaaacagacgcattcataaagatacaattcaaaaaggcggaactagaagacttaatcaatcaccaaaatatatgtttggttttcaattgtacgataaagttcattataaaaatgaagaactgtttattatgtctaggagaaaagatggaagaattactttaaaaactataggtggaaagatgagatatgaatctgtttcctataaaaaattgaaattccttgaaccaagaaaagctattattgtagcacgttatacaagaaataaactatatttgaaaggagatttttaa

SEQ ID NO: 973 - DNA, 288 bp, Unknown
  Ga0256407_10008120 JGI
gacagggttagcgattcgtaagtaatatttattattacttagtaattgagatatattacttgctgactaccctaagagtattattactctacgttacttaagaatatataggcacctgttgatatttgctctagtcttcagctctgcgattgcatattaaaagatctgacgaataggatcggtgtatgtaatatataaaaccttaagataacattggggaagggcaaattacatctttcgagatgagtcacttcagttggtagtgactgttttgaggtgatagttatg

SEQ ID NO: 974 - DNA, 945 bp, Unknown
  Ga0315286_10038107 JGI
atgcagtacgtgttcgtgttggacaagaacaagcagccgctggacctctgccaacctgccagggcaagacagcttctcaagaagggaagagcaaccgtatttcgccgttatcccttcacgatccggctcaaggaccgggagctggaagagtccgtcacccatgtccaccaggtcaagttcgaccccggcagccggataagcggtattgcaatggtcagagaagaggatggcaaggtgctttgggcaggtgaactggcacaccggggactggccatccagagtgccctggatgaccggagagccatccgacgagggcggcgaagccggaaatgccgctaccgcccacctcgcttcgacaaccgcaggcggggggagggttggctgcctcccagcctggaaagccgggtggccaatatccaaacctgggtaaagcggctgaggtggtctgctcccgtggaaagcatctcaatggaactggtgaagttcgacacccaggctctgcagaacccggaaatatcgggagtggaataccagcagggcgagctgatggggtacgagatccgagaatacctgctcgaaaaatggggtcggaagtgtgcctactgcggcgggacaggagtgcccctgcaagtggagcacatcgtcccgaaaagcaggggcggatcaaagcgggtcagcaacctgaccttatcctgccaggagtgcaacctggagaagggcagccgcacggcggaagagttcggtcacccggagatccaggccgaagcccggcagcccctcaaggatgcggcggctgtgaataccacccgttgggagctctggcgcaggctgtctgagagcggattacccgttcattgcgggacgggaggcaggaccaaattcaaccgcacccgtttcgacctgcccaaggcccactggatcgatgcggcctgcgtgggtgaagta

SEQ ID NO: 975 - DNA, 274 bp, Unknown
  Ga0315286_10038107 JGI
gtcaacgaccccacgcataaatgcgggggcttgtgagaaccacaagccgagttgaccagcctcagccaccagtcgaaggactgacggggctacgttatcgggagagttgaagaacgcacgttgggatgcgcgagccagccccaacctctgcaactggatggttaaacatcttgagggtctaaagaagtgccacccagaagtgctgaccgataacattggcgaggctcacattaccgccgaatggcgagaaagggagtaatcccctatgcagtac

SEQ ID NO: 976 - DNA, 1284 bp, Unknown
  Ga0224423_10002744 JGI
atgacagtatatgtaattgactcttgcgaaacacctcttatgccgaccagaaggctcggcagagtcagacatatgctcgactccggtgaagcggaaatagtctgctatttcccgtttacaatcaaactgagaagaaaagtggagcgagtgtacacacaacccctgcgggttggtgttgacactggtttcaaacacgtcggcataagtatatcaactccaagaagagaactcttccgttatcatttccgtcatcgctcacatgaagtgaagaagaacttgaaagaaagaagagaagatagaaccggaagaagacacagaaaagttcgtcatcgaaagccgcggttcaataaccgcgtcaagtcgaagaagaaaggatggattccgccgacatctcgtcatatggtagagtctcataagaaagatatagaacttgctttgagattcattccaaagtctgctatagaatttataaatctcgaaatcggagaattcgacacgcataagatgcgtgactcagatgtagaaggagagatgtatcagcaaggcgacttaaccggcttcgacaacgtcaaagccttcgtcagatggcgtgacggaaacatatgtcagcattgtcacgggaaatccggtgacaagaagatcagagttcatcatatcaagcaccgtgtcaacgacggtcctgataacccagcaaacctagtttgcttatgtcacacatgccatactaaataccataacggagaaatcaaattgaagatgtccaatttgaatttgaagactattgactctcttcgttctgctgctgcgatgaatatagtcaaagatagaatattcgacgaagtgaagaatatgtttccagagactgacgtgagaaagacatacggttacatcacacggaaaaaccgtgtgataagtgaacttgagaagtcacatacaaatgacgctctgattatctcaaagaatttcaatgctgttccggaggaacagactatagaagttaagcatatgagacgtcataacagacagattcataagaaaaatcccattaaaggtgggatccgaaagaaaaaccaagcaaagcatttcataaagggatttgctctcaatgatttcgtctgcttggacaaccaagcaaccgggtttataaccggccgtatgtctagcggatatgtgactatcaagacgattgatgatgaaaagattcacgaaaagacagtcgtttctatgaaacgaatcagattgataagaagagcaaaaggaatgatttatgattacaaaaaataa

SEQ ID NO: 977 - DNA, 341 bp, Unknown
  Ga0224423_10002744 JGI
gtcaccaactgtctaagtaaaagacttagcggcttggttctttagggaactgaagccgatggtgactagcctgagtgaaaggagatagccggatggaatccggcagactcccgaactacgttactggagaatataacgataggtaccgatggatataagtcctagttctccgctctacgcttcaagagttaaacagtcctgtacggtagggacagtgcattgaagaaagaaacctccggataacattggcgaagggctaccaacagggcgtaacgccctgcataatccttaacgggatatttataaaatgttaaattaaaattattaaactctcaatgaca

SEQ ID NO: 978 - DNA, 1305 bp, Unknown
  Ga0224508_10013895 JGI
atgtcgaatgcagtattggtgatcagcagcgcatacaaacccttgaagccgattcacccagccgtcgctcggcgcatgctgcaatcccggcaagcggcggtgtttcggcgctatccgttcacactcatttgcaaatccggggtgaccacgggacaagctgaaaacgttcggttgaagatcgaccctggcagcaagaccactggtctagcgctacttgttgatgatgcgctggtgtggggcgcagagctgaaacatcgtgggcaacagattcaagatgcactcgaaaaacgccggtcgtttcgtcggggccgtcgaagccgcaagacgcgctatcgcaagccccgtttcgataaccggcgacgttgtgcgggctggttgccgccaagcctcctgcatcgcgttgaaaccaccatgacctgggtgcaacgcttgtgtcgatatgcgccggtttgcgaaatctcggtagaatgtgtgcggtttgatatgcagctcatccgcaacccggacattgaaggcgtggactaccaacagggcgaactctggcagcaagaggtccggcagtatgtgttcacccgtgccggatatgcctgtgcctactgcggcgcgaagcatgtcccacttgagcttgaacatatcataccgcggagcaaaggcgggtcgaacgcgcccaacaacctcacagcatcatgtgtgtcctgtaatcaggcgaagggcaatgaatcgattgagacgtttctcaagaccaagcccagcgttctggcccgcatcagggcccaactcaaggcgcccctgaaagatgccgccgctgtgaacgccacacgctggcgtctaggggaggaactttgccgcacgggtcacccggttgaagccggaacgggaggccagacggcatggaaccgcaaacgacagggcttgccaaagacgcattgggttgacgccgcgtgtgtcggtcagtcgacccccgacgcgttgcatatgtgggtgacgcatccgttgcagatcgtctgtgccgggcatagctcgcgccgtatgtgtttgtccgacaagtatggctttccacgcacctcgccaaaaggctctagccaagttcaaggctttaaaactggagatatcgttcgtgccgttgtgccgagtgggaaaaaggcgggtatctatgttggccgggttgccgtgcgaagctctggctcattcaatattcaaacgccaaagaggactgttcaaggtattggctggaagtgctgtatgcttgtgcatcgtgcagatggctatctctacagctttggagcatcgagctccatgctatag

SEQ ID NO: 979 - DNA, 251 bp, Unknown
  Ga0224508_10013895 JGI
gtcagctaccgcctcgactgaagtcgagcggcttgaaaacgccgagagctgaccagactcagtcgcgttcagtcgcggctacgttaggcgcgaaataggtaccctggggtggccgaaccagctccaggctctacggtgtcaggttaaacaggtccgatgcggtcaagcccgtgcctgacacgcgaaaccgtgccctaacttggtcgaggagcacatcacctcctttaggagagaagaccatgtcgaatgca

SEQ ID NO: 980 - DNA, 654 bp, Unknown
  Ga0272428_1003415 JGI
atgaacggtgtgtatgtcctttcaccagatggggtgccattgatgccttgctcctgcgtgatcgctcgtttgttactcaaagatggaaaagccaaagtcgtgcgtagaacgccatttaccatcaagctgtatacacagccagtgaacccctctacacaggcattgacgcttggcatagatacgggcagttcagtgatgggttcggctgtggctgatgaaaacgggaatgttctctatctttctgaggtggaaatccgcaatgatatggcaggattgtcaaaagagcatgtctttgatgcaacgatgatcgccacgcgagggatcataccaatcttccgcacaaccactgttctctccaaacgatgtgtgcctgatggagattaccagcaaacgaagggaattcgcagtgaacagcgaatcatcacagggaagattgggggatttcgtaagttcgacaaagtgcgttacttaggtcaggaatacttcatcaaagggagaatgtctacaggctacgtcatcttgatggagctttctggcaacaaagtggctttgaaacctctccccaagtttgacaagatgaaaagagtgagcgcccgttcatcatgggtgatgagacaaaaaaccatgccaagtttctcatcctctatcacctga

SEQ ID NO: 981 - DNA, 299 bp, Unknown
  Ga0272428_1003415 JGI
gtgaactaccacggggctaaagccctcgtagcttcttcggaagcctgagttcaccagacttgtcaccagaaatggtggcaccgttcgagaggtcatgacacctgcggttgacgcatcagatcgctgctctgtcgcctgggtttaagaaggactgagggaaggttcggtgatccaggctcaaaaagccttttgaaccctgtcgagatgaagccggattctcttcgtggtcacagcgaagagatacgcgccacctgcgtaagcagagcatttttctgaaaggaattctttctatgaacggt

SEQ ID NO: 982 - DNA, 1311 bp, Unknown
  JGI1684J13235_1001204 JGI
ttggtaaaagttattgccaaagatggtacagtattacaacccacaaacagacatggcaaagttagaagattacttgataacaataaagctgaagtggtatgtaaagaaccttttactattcgtttactttatgaagttgaatcaaaaaaaactcaaacaattaaggtttattttgatactgggggtaaatatcagggctttgccattatttctaatggtaaagtgattcataaagggactattgaattaagggatggtattccaaagcttttaagacaacgaagacagtacagaagaggtagacgacacagaaacaaacgctatcgccaacctagatttgataatcgcaaaagagataaaggttggttaccaccttcagttaggtctaaatataagcatatactgaactggataaataaactaacaagttatctgtcggaatatgagcttactgtagaagtggctaattttgacatacaaaaaataaaagaccctggcattgaaggtaaagattatcagcggggagaaaaatatggctatgaaaatacaaaacaatatcttatctttagagaaaatgccagatgtcagctatgtggcaaaactaaaggtgaagatagctggaacatccaccatattatttccagaaaagatggtggtaccgatactcctgataacctggctttacttcatagtaaatgtcatgagaagctgcataatgataatttagatagagagtttaaaacaaaggcagataatttagataataatggtcaaaactttaagtatacaacttttatgaatatcattaagaacaaattatatagagatttatctgacagatataaaggtaaagttgattttacctacggatatattactaatattaatcgtagaaaactagaattatctaaaacccattataatgatgctatagcaatgaataaagaatctgttgaagataacaaaaagccaatatatatcaaacaggttagaaagaaaaagcgttcattgcatgaagccattccacgagctggcagaggagataaggtaaatagtgagcaaaaacgtagttctaaaaatactaaagaagttgtaaaaaacggcaagaagtgggttttatgggataaaatatatatcccagaattaggtacaacagggtttatatcaggatttagtggtaaatgggtatatgtacaaaatatagatggagaatatttgcaattaccctctaaaacctataagcaaataaatcctgatagtgtaaagcttgtatgtagaaataacaactggattagaaaaaaaacagcatag

SEQ ID NO: 983 - DNA, 291 bp, Unknown
  JGI1684J13235_1001204 JGI
gtcaactaccacccctaaattataatcaagatttagaggtggcttgtgaaaaacagtcaagccactagttgactactctaagccttagttggctacgttatcttagttatgatacctgtggatgatgctctagtctgtcgctctatcgtgcataggtaaacagtcctgagtggtagggacagtcgtatgcacccaacaagctaagataacattgaggaagggcaaaatagttttacctacggcttttatagccgccttaacggggtttaaattccttaacgaaaggactga

SEQ ID NO: 984 - DNA, 1227 bp, Unknown
  Ga0071116_1000008 JGI
atgtcaaatttagtttatgtaattaataagaatgggaatcctttgatgccttgtaaacctgctaaggctaggcatttactagaggctggtaaagctaaggttatcaagcgtataccttttacaattcaactgttatggaattgtgaagagaatgtgcagcctataactttaggaattgataaaggttccaagattactggtttatgtgttgtagaaagtgacaatagcaaagtgttatttcaagcagatttaagacatcgtctagacgttaaagaaaagatggagacgcgtagagagcatcgtaggtctcgtaggaaccgtaaatggtatagaccatgtaggtttttaaatcgcagtagttctaaacgtataggaagactacctccttcaattagaaccaatgttgaggaagtaatcagggtagttaataagttaaaagtgatgttacctataaccagtattgtagtagaagatgtattagtggatataagaaaattgaatgaacccataattaaaggtaagcaatatcaagtttctaatcgcctatctgagaatttgcggctagcatgtttaatgagagataattttgtttgttatacgtgtaagtctaaaggagaactacatgctcaccacattgtatggaggtctaagggtggttcagatactattactaatttgattacattatgtaagaagtgccacaacaaggtacatagtaataaattaacattggacttacgaggttctaacaattttaaagaccgtatagcacaacgtacaatgcaaggtaaatcttatctttatagacaattaggaaatcctgggttagtttatggatatgaaaccgctgagcagcgtaagaaattacaattggataaaacacacatgatagatgcatttataattgctggtggtaataaatatacaactgataactcttatttcataaatttcagacttaggcaaactaggcgacaatattatgatttgcctagaaaaggggtgggtagagttagatatcaagtcaatgaagaattaaatggatttaaaaaaggggatgtcgttttggtaaaatcttttgtgaaacaaattaattcgattcgtagtgatggacgcttaggtttttctaaaagcataaatagtggaccacagacggcactaccaaaacattgtatattactagaacgccagaagacagttgtctttaatacagttaatataaggtag

SEQ ID NO: 985 - DNA, 250 bp, Unknown
  Ga0071116_1000008 JGI
ggcaatgtgattatttctaaaaaagataaagcaaattactattatcttttatgaaataaacagcgggctctggataagtgcaagagcagaagttaatttaattattctaccaacagatgttgttccagtctgttgctctagaacttgtaactaagggtagcggaaacgtgaatgtgttacaagtgtaaaaagtttaattaacaaccgcgaggagcaactaactctacggaggacttaaatgtcaaattta

SEQ ID NO: 986 - DNA, 1251 bp, Unknown
  Ga0180438_10003339 JGI
atgcgtgtatctaacaataaacacaacaccaacacacacaacacctcccgtaaagtgtatgcgtatgtgttaaacatgcgaggacaaccgctgatgccaactacaccacgaaaagcgcgtcttcttttgaagaaagagcaagcaagagtagttaatcgctgtccttttatcattcagttacaatatgccaccggagaaactacacaaccgattaagctgggaacggatcttggatatactaaaatcggctttagcgccacaacaaatcggttagaactgataagcggcatatttacgcttcgcaaagacttgtcaaaaaagataggcgaaagacgaagctatcgtcgaactcgtagagggaaactatggtatagaaaaccgaggtttcttaataggaaacaggaggaaggctggttggcacccagtaagcagcaccggttagcgtcccatcttgaactggtcactaagctggagtcattgttgccaatcagcttcaaaaaggtagaagttggcaatttcgacacacaacgtatgcagaaccctgaaattacaggcgtagaatatcagcagggcgaacttcagggctacgaagtcaaagaatacctgttagacaaatggggacgaaaatgcgcctattgtgataaaacggacgtgcccttagaagtcgaacatatcgtcccgaaaagtagaggcgggaccgatcgagtgtcgaatttgacgatcgcttgtcgcgcctgtaatctaaaaaagggagatcagacggccgaggagtttggctaccctaacatccagcaacaggcaacgcaaccgcttaaagcagctgcctgtctgaataacattcgctggaggatagtggagcagttagaggcagaatatatctacggatatgttaccaaatacctgcgtaataagttagaactagaaaaatctcatgttaatgacgcattcgtaatcgcaggcggaactaatcaagaacgctgccgtccgtacgaggtcattcaagtcaggcgaaataatcgttgcttacaactgaaccgaaaaggctttagaccgtctattaggagaaagcggtaccagttacaaccccacgatcttgtaaaatatgagggcagaacttataaagtaaagggagtccattgctatggaacacgggttattttaaaaaatgttaaaggaaaaaacaaaagtgtaactatcgacaaagtagagttggttacatatggaaagggattacaattcattttatgttag

SEQ ID NO: 987 - DNA, 258 bp, Unknown
  Ga0180438_10003339 JGI
gtcaactacctcaccctgaagggtaggggcttgggaacttgttaacgagccctttagttgattagagggctttcctttgtgggaagcagcagttgttgaggttatgacaccctggggtgctccactagccccttgctctgtcgtccattgattaaaagttctgaggggtaggaacggtgtcatggacgggtaagccttgacaacagtctcgaagtggacttactccgtattcgtaagaaaaaggaggttagaacatgc

SEQ ID NO: 988 - DNA, 1071 bp, Unknown
  Ga0213878_10002132 JGI
atgcaatctacgttgaaagcgaagtccaagactcaccctgggatgcttcctcagttccaggctctgaaagtctcgtttgacgcatcggcaaaggtaaaggccgggacgagcgagacggattcgggcaagcaaaggcttaaagcctcgcgtgttgtggatcagactgcatttcaacatggccgaggggagcgtccgaaaggaccgttaccttctcttcaaagggaagaggaaagcggagtaatccgcgtatttgtgaggtcatcgaatggaaagcctctcatgccctgtcaccctgccagggcccgacaactcctgggaagcggacgtgcccgcgttcacagattatatccatacacgattcggctggtggaccgtaagaagggagctaagcagccggtggtgttaaaagttgacccaggggcagtcacaaccggcattgcgctaaatcggcaagaactccacaacagaaaacaccaagccgtactccacttggccgagctcacccatcgcggggcacaagtccgtgccgcgctagctcggcgagcggcatatcggcgccggcggcgcagccgaaaccttcgctaccgggctccgcgatttcttaaccgaacgaaggacaaagggtggctggtgccaagcctgcggtcacgcgtcgataacatcctctcatggcagcagcgttactccaagctggtgccaatcacctcgatcgaaatagaatctgtcaggtttgatctgcagaaagataacaatccagagattagtggaatcggctaccagcaaggtacgctagcgggctacgaggtacgcgagtatctgctcgaaaagtggggccgtaaatgcgcctactgtgacgcaaacaacgtcccacttcagatcgaccacatcgttcctcagaaaccgaaaaaccgcttggcttcaaaggggtctaacagaccaagtaatctgaccgttgcttgcgagtcatgtaatagagctaaaagcaacaacccagtcgaactcttcttgtccgatcaacccgaccggcttgaatacattctttcgcatacaaagcgaccgctgaatgccgcg

SEQ ID NO: 989 - DNA, 241 bp, Unknown
  Ga0213878_10002132 JGI
gtcagctacccgcgctcaaacgcgtgggcctgtagcgatacaagccaggctgaccaggccaagaaagcaactaaatgcaatctacgttgaaagcgaagtccaagactcaccctgggatgcttcctcagttccaggctctgaaagtctcgtttgacgcatcggcaaaggtaaaggccgggacgagcgagacggattcgggcaagcaaaggcttaaagcctcgcgtgttgtggatcagactgc

SEQ ID NO: 990 - DNA, 1446 bp, Unknown
  Ga0181296_101698 JGI
atgaaagtatttgtggttggatccgatcaaacacctttaatgcctatgcatgctgcaaaagcccgcaaattattaaaacttaagaaagccaggttgaaaagccggaagcccgcttgtattcaacttctttttgcgcccgaaaccatttcgcatcagcctgttaaagttgggatcagcaacggcgccagggagaccggcatagctgttgtccaggaaagagttaaaaagcggagtgttactctcttagtcggagagatatccctggcgaacgacatttccaggcgcattaaagttcgtcgcacttaccgaagggcaagacgcggcagactgcgttatcgtaagccgcgttatgataacagggtcagggtgaagtgtcatgtttgcggtaagaacgccgcgaagggcaaacaaacctgcaaggcgcacagggcggtaaagccggaggataaaatcagcacgaactcctggctacccccttcgcttaaagcgagaaaagactcaataataagagttattaaaaagatccggcgctgggccccggttagttcttgcacaatccaattgggaaggttcgatttgcataaaatcgcagccgtcggcattaatgaagcgggttatcgacaatatcccgtatatgaacgtgatacagtcaaagcggctcttatttttgaatatggtcgcagacaaaaagagggggatacagaaaagattattccacgctgttgttattgcgataaagaaggtaacggagtggaaatcgaacatatcctgcccaaaagtaaaggaggcggtgatagttggcgaaatctcacactggcctgtaaggaatgcaacaataaaaaaggcgacatgacccctgaagaagctggaatgaccctgttatatgagcccaagccgcttcacctgtccagggtctacaagtatatcatgcggtgtcagcaaggcaagaattacctgttgagcaatatcaattcttttggaataccttgtagtttcacttatggacagtttacaagctggcagagaaaaaggtttggaattgataaaaaagattatgacgactcaattttaattgccgcgtcggtatacgacgacagaattagaccggggctgccgataaaaaaagttgcgcctttttatatctggctaacgcctacaaagcgcagacagatatttaacgcttcccattattctccaagcaagagaacgccaaaaggtttctccagcgaagctacggtggactttggttacactttaaagactcttgtagaagtcaataaagcatgcgttatcatgtgggacagagctaaactcgtctcaaaagctattaagaaaagcgaaagcattccgaaaaatgccgtcttggttttaagaaagggagatatcatcaatactttgcatgcaggcaaaaagattacaggtagagtcagctccttgatgagcaac

SEQ ID NO: 991 - DNA, 320 bp, Unknown
  Ga0181296_101698 JGI
gcagctccccattgattgtgagccagcttcagcgacaaacccccagtaatgggaataaggatgagctacctttgatgggtttgccaaagtgccaccctggggtgttgttccagctccaggctctggaacctttgagtaggaaaactcgccctactgttttggagggaaggaatccgagatattcaggtacacctcaaaggacaaggttaccattaaagtttagcgaggagcgattttaccgctcttttagaaagagcgagtagcttattataagcgccataatcaaattagagttgataatggggtactcatttatgaaa

SEQ ID NO: 992 - DNA, 1296 bp, Unknown
  Ga0335394_10010380 JGI
atgcaacgtgtattggtgatcgacaaaaacaagcaaccgctcatgccctgtcatccggcacgagcgagagaactgcttaataaggggaaagcggcggtctaccgtacttttcctttcaccatcatcctgaaagaacgtgagggcggtgatacacagcccatcgcgttcaagatcgatcccggcagcaaggcgactggcatggctttagtcgcagacttcaagcgtggcaagcgggtgatttgggcaggcgaactcacccatcgcgggcagcagatacgcgatgcgctcctgtcaaggcggcaactgcgacgttctcgccgcgcacgacacacgcgctatcgacaggcgcgctttgataatcgccgtcgtccagaggggtggctgccgccgtcattaaaaagccgcgtggagaacatttggacatgggcatgtcgcctgaaccgtgcttgtcccatcgccagtatcagtcaggaattggtgaagtttgatatgcagttgatgcagaacgccgaaatcaggggcgtggaataccagcagggcgaactggcggggtatgaggtgcgcgagtacctactggaaaagtgggggcgcaaatgtgcctactgtaatgcgaaggacttaccgctgcaagttgagcatatcaaccccaaattgcgcggcggcagcaaccgtgtcagcaacttaaccctcgcttgtcacgactgcaaccaggagaagagaacacagacggtggcggaatttggtttccccgaaattcaaaagctggcaaaagcccctctgaaagacgctgcggcggtgaatgccacacgatgggcgctctaccatcgtttggaaacaatcggactgccattggaggtcggcacgggtgggcgcaccaagttcaatcgcacaacgcaaggttacgcaaaaactcactggctggacgcgacgtgtgtgggcgagagtggcgaaaaagtctatatcacggctagcgatacaccgttgttggttaaagcaacgggtcacggttcacgccagatgtgtcgtaccgacaagtatggtttcccatcgcgttaccgtctgcgtcagaagcgccatttcggttttcaaacgggcgacatggttaaagctatcgtccctgctggcaaggttgtgggaacgcatagtggtcgcgtggcttgccgtgcgacaggcagtttcgacatcacaacagcaaccggaaaagtgaccgtatcgcatcgatataccaaggttacccatcacgccgacggctacaattataagaaaggacaaggcgctatccctccccatgcctaa

SEQ ID NO: 993 - DNA, 253 bp, Unknown
  Ga0335394_10010380 JGI
gtaagcatccccacgcctaaaggcgggggcttttagccccaatgcttacccgactcagcctcgcaagaggctacgttagcggcgaaaatataggcacttcggaatgctacgccagttccgaactctgcggtgaacgattaaaaagaatgcttgggagcaaacagtgtcgttcgcaccaaaccgtcgtataactttgtctaggcaacattacacccgtaagggaagaaaagttgaggtaactcaaatgcaacgt

SEQ ID NO: 994 - DNA, 1221 bp, Human gut metagenome
atgcgcggcaagcctctgatgccgtgttcgccagcaaaggcgcgacacatgctgaaggcgggcaaggccgtcgtcgtgcgtcgaacgccgttcacgatcaagctgaccatcgccacgggcgagacgaagcaggacgtgacgcttggcgtcgatgcaggcgcaaggcacgttggcatttccgccacgacggaaaaggaggaggtcttcgcgtccgaagtcgcgcttcgacaggacatcacgggacttctggccgatcgtctggcattccgacgtgcaaggcgcaatcgaaagacgcgctaccgctccccgcgcttcaacaatcgcgttcgatcaaagcacaagggatggcttgcgttgtccgttgaaaaccgcattcaggcgcacatgtcgcgcatcgatgcggtctgcagactgcttcccgtcaccaagatcgtgattgaggcggcatcgttcgacgttcagaagatcaagaatccgactattgaaggcacggactatcagcagggcgaccagcttggattctggaacgtgcgcgagtacgttcttttcagagacggtcatgtttgccagcactgtcatggtcgttcgagggacaagatcctcaacgtgcatcatcttgagagtcggaaaacgggcggtgatgcgccaaacaacctgatcacgctgtgcgagacatgccacaaggcttatcacgcaggaaagatcaagttgaaggtcaagcgcggtcaatcgttcagggcggaagccttcatgggcatcatgcgctggacgctgcttgaccgcgtacgcaagacgcaccctaaactgcctgtcgagaacacctacggctatctgacgaagcacaagcgcattgctcttggcttgcccaagacgcattgcgccgacgccttctgcattgcgggaaatctgaaagcgttgcgaagaggagatttcctcttccagcaacagacgcgaaagcacaaccgacagatacacaggtgttcgattctcaaaggcggagtgcgaaaactcaatcaggcgccattcctcgtcaaggggttccgcctattcgacaaggtaagaatcggcggacagattggttttgttttcgggcgacgcgttagaggcatattcaacattcgtcgccttgacaaaactgtgatcgggaaagacatcaattgcaaaaaactgagtcttctcgaaacacgcaaaacttttttgattgaactacgaaaggagtaa

SEQ ID NO: 995 - DNA, 300 bp, Human gut metagenome
gtcaataacccccgcctaaaggcggaggcttgaaagagcctttattgactagtctcagcaaacctcctctgggaggagagctacgttggttgggaatgtacaggcaccgtgggatgtttatcctagtcccacgctctgcggtctgtgtttaaaagttctgagaggtaggaacggtgatgcagacaagaaaccctttccaacattgacgaaggatgacaatcggccttcgggccgatcaacaccggccttcgggccgagcaagcggagcctgcgggtatccgcaaaggagatactttgaaa

SEQ ID NO: 996 - DNA, 1167 bp, Unknown
  JGI11958J13698_1112174
atgttacgagtaccagttttatcaaaatcaggtaagccgttaatgcccaccaaacctagccgcgctagacgttggttaagggatggcaaagccaaagtggtacataatgacttagaatgctttgctattcagttgacctttgagacaggagaggaagcgcaacccatagccatggggatagaccctggtaagggttactcagggatcggggttcagtcaagtcatttcaccctctggatgggacacctagttctaccgtttaagacggtgaaagaacggatggaattacgacggattatgcgtcgagctagacgagggaaacgaattaaccggaagttgccctactctgaacgttgccatcgtcaagctcggtttgacaatcgtaaaaagggtaaactgccaccgtcaatccgagctaataagcaactggaattgcggatagtcaaagagttgtttaaactgtttccgattagtgccattcattatgagttggtcatggctgacgtagataaaaccagtgggcgcaagtcggctcggtctggcgttggtttctccccagtgatggtaggtcagaaacaaatgcttaagtggttgtctgagttagcgaccgtgataactcaccaaggatggcaaagggacgggaacggaaccagtcagcttaggcaatggttaagattagccaaagacaagaaagacaaatcgaaccagacaccagctacacaagccgttgatggtgtaaccttagccgcgtttgagtttacccgatggcaggaatggcactctgataatgccaagcatggtgactggcaaggcagtgtcgaagttacctcagcaccatttgccataatccgtagaccaccaattagccgtagacagttgcatctgtgtgttccatccaaagggggtaaacggcgcaagtatggcggcacagttacccgccatgggtttaggaaaggcgacaaagttatagccgaaaaagctggaaaaacttacgtcggctggtgttctggagacaccgagaaacaagtttcagttagcggtattaactggaaacgacttgggcaatttagtgccaaaaaagtccagttgttgcagcgaagcacgggattaatcgtcgtgccttcacctggactgtcaaatctccccttattgaaagggtcgatttga

SEQ ID NO: 997 - DNA, 228 bp, Unknown
  JGI11958J13698_1112174
ttcaacaaccccacgctactagcgtagagcgtggggattgccggacaaacgacaatttaaaccgttgaataccgctcttagtctcagcttggcacagacctccggatacttccctagtccggattacctctaaaaccttttgtcgggttgttgttggacaagacatcttagctgagatggcgggaagggactaattactttactcggaggtttatcaccatgttacga

SEQ ID NO: 998 - DNA, 723 bp, Unknown
  Ga0206349_1775808 JGI
ttgagtaacgtttttgtagtcgacaccaacaaacagccattaaatacgattcatcctggaaaggcacgatttctccttaatagagggaaagcagcggtcttgaagcactttccgttcacaatcattttaaaggttgaaatttccgatccagtggttgcagaactgcgaatcaagatcgacccaggctcaaaaaccacggggatagcgatcgtcaacgaccagtcgggcgaagtcgtctttgcagctgaactatcgcacagaggtcagcagatcaagaagagcctggacgatcggcgtggtgtacgtcgaggcaggcgcaaccgacacactcgctacagaaagccacgttggcacaatcgacgcaccaagaagaaaggctggttaccaccatccttgcagagtcggatcagcaatatcatcacgtgggtccagcgacttgcaagagtctgccatatcacagctgtgagcctggaattagtgaagtttgacatgcaactgatggaaaacgctgagatatcagggattgagtaccaacaaggtacattagcaggatatgaggtgcgtgagtaccttctggaaaagtggggacggaaatgtgcctattgcaacaaggatacggtgcaacttcagattgagcacattcatcctcgggccaatggcggtaccaatcgcatatccaacctctctttagcgtgcgagaagtgcaaccgtgcgaaaggaacc

SEQ ID NO: 999 - DNA, 279 bp, Unknown
  Ga0206349_1775808 JGI
gtcagggacccgatcccctaaaggggatgggcttgcagtgatccggtaatggattgctacaagcttcacctgtccagactcagctaggcaactagctacgttagaggcgaaattaggtaccataggatgcgaggccagtccaatgcgctacggttgcaggttaaacaggtttacaagggttagtgccagtgcttgcaacgccaaaccgtccctaacattgtcaaggccaccattacccgggtaaccggaggctctcaaaggagcaagcacttgagtaac

SEQ ID NO: 1000 - DNA, 486 bp, Calothrix parasitica
atgcgtgtacctgtaattaatttcgatggcaagccgttaatgccgactaagccaagtagagctagacggtggataaaagaaggtaaagcagtagataagtggtcaaagttaaacctattttacgtacagcttttaaaacctgattctggcaataaaactcaggatgtagtagtaggtatcgacccaggtaagcaatttagcggaatagcagttttatcccaaaaagatactaccaaaggaggtaaaagacgtaaatatggcggcactgttacacagcacggatatcgcaaaggtgattatgtcgaggctattaaagctgataaaacttaccgagggtgggtaagtggagatactaaaactcaagtatcaatttctgatgctaattggaagcgtctgggacagtttagggtatctaaagtaaaacttctacagcgctccaggggtctaatagtaactttccaaaaatacaaagtccacggcgaataa

SEQ ID NO: 1001 - DNA, 264 bp, Calothrix parasitica
gtcagtaactcaggtaagacagacactgagcttgccggagccaaatccagcaacgtaagtattgactagcccactgagccgttactcggtaaagacttccgaatgtttccctagttcggattatatctaaactcgtttggtcgagtgcttgacggcaataatgcgggaagaacatctacactgcattttgccttaagaaaggacatcttagtagcggtgggcgaagagacttaaactttacacgaaggattatctcttatgcgt

SEQ ID NO: 1002 - DNA, 1263 bp, Hhuman oral metagenome
atggtttatgtaataagcaaagaaggacagccaataatgccaacagagaaccatgcaaaggttcgtctacttcttaaatcaaataaggcaagggttgtcaaaagaacaccattcacaatacagttggtcagtacaagcaaaacgtacacacaggagataacgctcggtgtggatgcaggatctaaacacgttggtctatcagcttcgacagaaaagaaggagttatttgcagcagagcttcgcccacgaaatgatgtcgtaaatttgatgtcatcaagacgagagttacggcgttctcgtagaagtaggactacacgctatcgtcaagctcgttttcttaataggattcactctaaacacaaaggatggcttgcaccatctgttgaagtaaaaatctggaatcatattcaaggtattaagttgataacaaaacttttgcctattaaaactatctgcatagaaacagcagaatttgacttacagagactcaaggctttggaagcaggagagcctattccagttggtaaagattatcaactcggagagatgtatggacactacaatgtgagacagtatgttctacaccgtgatggctattcctgccagtgttgcggtgctcatagcacagataagaagaaggtaaaactccatgttcaccatctggaaacccgcaagacgggcggtaacgctcctgacaacttgataactctttgtgaagattgtcatacagggtatcatgctgggactgttgcactaccaacgacaaagcgtaagagaaggtctactcgcgacgctacctttatgggaatcatgcgaaagacactgatagaaaggcttcacaatatgttcctagacataaatatttgtagcatttatggctacattacaaaatactggcgcgagaagaaaaatatcaccaagacacatataagtgatgcctttgtgatagcaaagaatcttgatgcagaaagactagaaaaggctttgttgatagttccgaaacgacaacataaccgtcaaattcacaaatgcaagatcaataaaggtggcacgaggaagatgaaccagacaccaaaatttgtgttcggctatcaactttttgatagagttatgtgtctaggacaggaaggttttatcttcgcaaggcgttctagtggatcgtttgacattcgtaaactaaatggtgagaaaatcaaaccaaatatcaactataaaaagttaaagcacttagaaagccgcaaggcattattagtttcttattga

SEQ ID NO: 1003 - DNA, 283 bp, Human oral metagenome
agtttgatcagtaaccaacgactttagtcgtgggattttacaatcccttactgattagcctaagttccatgagaactacgttatctgagaatatataggcactttgggacgtgagtccgaatcccgaactctgcggcttgcagttaaacagttctgagaggtaggaacagtgctgtaagcatataaaaccttggaataacattggctacggacaactaaccctagattactaggagataacacctgctttgataggtgctgaaacaaggagttatataatatg

SEQ ID NO: 1004 - DNA, 357 bp, Halomonas pantelleriensis
atggcggttttcacgctcgacaaacacaaacggcccctgatgccgtgcagcgagaagcgcgcccggctcaacaagtacggttttccgcgtggctacctgatgcgacagaaacagatccgtggcttccagaccggcgatagggtcaaggccatcgtgccgagcggcaagaaagccggcgtgcatgtgggccgagttgccatccgcaagaccgggagcttcaacatccagaccgaacagggtggcgttcagggcattgcctggcgtcactgcgccctgctgcaacgtggcgatggctacgactatcaccagacacccacccgtaacgacaaaggaggagcgggacgggcggtagcgtga

SEQ ID NO: 1005 - DNA, 293 bp, Halomonas pantelleriensis
gtcaactacctctccctgaagagagaggcttgtgaacacaagcccggttgaccagggaaagcggtagccaacccgctacgtttgcaacaggtcgccaagacccacgccaccgtgcttcctcagcggtgggctctggaaggtcagaatcatgctggcgaaaggtaaagcgccgaaggctctgatcgctacggcaacgtaggagccggttgcagacattcccgaggggagacgggccgataggcccgcgacaccaggcccgtaagggcaacgacacggaggaaatcgtcatggcg

SEQ ID NO: 1006 - DNA, 1323 bp, Unknown
  Ga0136257_102499 JGI
atggatcaaaacagaatacttgtacttttcgcagatggcagcgaagcgatgccttgtcatccagcgagggcacgacaactgctcgacgcggataaagctgcagtatatcgataccagccgttcacaatcattcttactgaacgagaagatggcgatactcaggatgttagtcttcaaattgaccctggaagccaaacaactggattagcactggttgggcatttccaagaaggaactcggttaatttgggcagcaaacttggaacacagaggcgatcagatcaaagaagctttgaggaagaagagacagattcggcgcagcagaaggacgagaaaaactcgttatcgagagcctcggttcgaaaaccgaacgaaatcggatgggtggtttccaccgtccgttcaatctcgcattgataatattagagaatgggcgaaacgactaacgagccgttgtcctgttgcgcaaattaaatgcgagacggttcgttttgatactcagaaaattcaaaatccagaaatcaaaggaaccgagtatcaggacgggaccctgaaaggctacgagctcagggagtatcttctgcagaagtttaatcactcttgcgtatactgtggcatcacagatgtacctttggaactcgatcacgtaaaacctgaaagccgtgggggttctgatcgcactagtaatttagttgtgtcctgcacggtctgtaatcgggacaaaggaagtcagcccgtcgaggaatttgttgaagacgaagaaaaactgagttggatcaaaaagagacaggatgaaaccatgaaggacatgggtgtgatgaacagcatccagtggaaagttggtgaagtacttgaggagaccggtctacttgtaagctaccactctggaggagaaaccaaatataatcggaccgatcaaaactataaaaaagaccactggatcgacgctgcttgtgtcggagaaccgaatgtgcatattccaaagacctatcgatgtttgaaaatcagagcgaaaggtaggggtgatcggcagatgtgtcgagtagatgccaacggttttcctcgcacgtctccgaagcaatacaaacgcatcgatggattccagactggagatctcgttcgggcagttgtgcctgaaaaatacaaaactagcggcacgcatgtagggaaagtcacgattcggtctaatggattcttcgcgataaacacgagagaagaacaagttgatggaattaactcaaaatactgcgagcctcttcagcgagctgatggatactcctactcacaagaaccgaaacaaactacgcactcctctcttgattaa

SEQ ID NO: 1007 - DNA, 317 bp, Unknown
  Ga0136257_102499 JGI
gtcaacgacctccgagtaaaaccgggagcttctaacagaagctcacgttgaccagcctaagtcatgctgaaaggctacgactacgttacgggcaaaaataacgataggcaccctggagtgccctcccagctccaggctctgcggcttctggataaacagactgagggtctaagtcagttccagtggcaaacaaactgtccgataacattggcgagggagccctgacctgcaagcgcgacattcgcgtaagcagagactggtaggtaactactactaacaattaataatcgcaaaccatagcgatggatcaaaacaga

SEQ ID NO: 1008 - DNA, 708 bp, Unknown
  Ga0137385_10003252 JGI
atgtcacaggtgtttgtcttagatacgaataagcaaccgctcaatccggtgcatcccggttgtgcccgcctgctcttgaaacagggcaaggctgcggtctaccggcgctacccgttcacgctgatcctcaagcgtacggtggagcgaccggagcttcagccgctgcgcgtcaagatcgatccaggcagccagaccaccggcctcgccctggtcaacgatgcgagcgaggaggtcgtgtgggcggcggaagtgcgccaccgggggggacagatcaagcgcgccctggacaagcggcgtgcggcgcggcgtagcaggaggcagcgcaagaccaggtaccgcccgccacgctttcggaaccggaggcctcgcacgggggccctgccgccctccctggagagccgggtgtgcaacgccctcacctgggtccgccgtctgatgcggctctgccccgtcaccgccatcagcttggaactcgtgcggttcgacacgcaagccctccagaatccgcagatcgagggcctcgagtatcagcaggggacgctttggggctacgaagtgcgggaatatgtcctgctcaagtggaatcaccagtgcgcctactgcgacgcgcgcgctgtcccgttggaactcgaccacgtgcagccgagagccaaaggcggctccaaccgcgtcagcaacttaacactggcctgcacttcctgtaaccaa

SEQ ID NO: 1009 - DNA, 312 bp, Unknown
  Ga0137385_10003252 JGI
gtcaggaacccgccccctagaagggggcaggcttgctcacaagaagaggaagcctcactcttgaccagtctcagccaccagtcttctccttcggaagagggctgacggggctccattcagggcgaatgcataggcacgtccgggtgcttcaccagcccggaccgctgcggagcagcattaaacaggtggacggggtaaagccagtgtgctgctcatctgaaaccgctcaggaacgttgacgaggtgagcatcacccgcgcaagcggaggctcgcaagagcaaaggaacgcaaggaatggctcgatgtcacag

SEQ ID NO: 1010 - DNA, 975 bp, Ktedonobacter sp. 13_2_20CM_2_54_8
gtgttgaagttcgcacccagggatgctgccccagttcctggctctgcaacctctgacttaaagaactgcggtccaggaacggtggtcagaggaaagtaccgcgtgctatccccgtcgaggggatcgttttcactccgaaaggagccttacctgatgaaggtgtttgtgttatcacaagaaggaaagcccttgatgcccacgactccacggcgcgcaagagtgtggctgaaggcaaaacgtgcccgtctcgtgcgccaagagcctttcaccattcgcttgcgctttgccacaaaggcgcatgtgcaagcggcgaaggtgggcgttgatactggctccaaaggcgtgggcattgctgccatcgccaatggcgaggtggtcttccaggccgaggtccatctgcgtgatgacatcacggagaaactgacccaacgacgccagtttcggcgcaatcgacgtgctcgcaagacgcgctatcgtgaagcgcgctatgacaatcgacgccgacctgatggctggttgcccccttctctgcactccaaagcagaggcgaccgtcaaggcggtgcgcttcatggcctcctttttgccggttggtcgggtcaccgtcgaggttggccgttttgacacccaaaggatgcaaaaccctgacatcgcccacttggagtaccagcaaggcgaactgcaagggtacttcctgcgtgagtatgtcttagcaaagtggcagaggacatgcgcctactgtgaggcgcgtgaggtgcccttggaactcgagcatattgtccccaggtcaaggggaggaagcaatcgggccagcaatctcaccctggcctgccatgcctgcaaccggcgcaaagggcagcaaaccgcagcggagtttggcttcccagacgtgcaggcaaaggctcgtgtgccgttgaaggatgccgcgcatgtgtcttccctgaaaagccgggtggtccaggacttgcaagccgtc

SEQ ID NO: 1011 - DNA, 298 bp, Ktedonobacter sp. 13_2_20CM_2_54_8
gtcaatgacctccccacagagtggggaggcttgtgaggggttcgcccctcgcaagccggattgaccagacgacacctccgagccagtcgcgccgagaaagcgagcgtcgtggctggtgctgaagaggtgggcgatagcaccaagtgttgaagttcgcacccagggatgctgccccagttcctggctctgcaacctctgacttaaagaactgcggtccaggaacggtggtcagaggaaagtaccgcgtgctatccccgtcgaggggatcgttttcactccgaaaggagccttacctgat

SEQ ID NO: 1012 - DNA, 1068 bp, Wastewater metagenome
atgttagttccagtcatggatttggacgggaagaccccgctgatgccaacgagaaagcaccgcgctatgcgcttgatcgagcgcggagacgcgaccccgttttggcgtaaaggagtgtggtgtattcggctcaaccgtgagccgagtgcccgcaatcttcaggcgattgtcgtaggagtcgatcccggctcgaagcgggaaggttattcagtagtctcggaggcgcacacgattgccaacgtccaagccgacgcgataacgcacgtcaaagacgcagtcgaagcacgacgtaacgcacggcgctctcgccggacacgtaacaagccacaccgtgcgtgccgttcgaaccgtggcgcgctacgtcggcaggagaatgggtggctccccccgtcaacgcgggcacggtgggagtggaaactacggaacatccggttcctggcgcggctgtaccccgtcactgacgtggtggtcgaggacatcaaagcccgcacccgcaaaggacgaggaggacagtggaacgggtcgttcagcccgctggaagtcggcaagcagtggttctacgtccaagttcagaaagactatcggctgtacttgaagcaaggctgggaaaccgccgagattcgcaaaacattgggcctgtcaaagtcgtcagacaagatgttggaacgttgggacgcgcattgtgtagatgcgtgggctatcgccaacgacgcgctgggacagccacatgccgctcctggcgacacatcgatgctggtcaccaaatcgctgaagttttcacgccgacagttgcatcgcttccagccctctaagggcggtgaacgtcgcccttacgggtctacgcggtctctaggattcaagcgcgggtccatcgtgcgacacccgaaatggggagtgtgtctcgtgggagggacctcccagggacgcatcagcctgcattcgcaggaaaccaacaaacgtctatgccaaaacgccagagttggggacattacgttcctcgcgtataatgataggagccagcgttatgtcccctccgtgaatgttggggtctccacgctgggaatctga

SEQ ID NO: 1013 - DNA, 210 bp, Wastewater metagenome
gtcaataacccctccccaatagggaggggcttggggaagcgaaagccacctcgcgaaaccgagataacaccgttgactacacaacaactgaatagttgaactgttgatctgggcgtggcagcccaaacgacgctagagatgcccacctagtccctagcctctcggatcaggagtgtggaaggtgcgtatataggaaggcgtaagccacat

SEQ ID NO: 1014 - DNA, 1464 bp, Mouse gut metagenome
atggtatatgtactggacagggacgggaggccgctcatgccgacagacaagcacgcatacgtgcgcatcctgctgaaatccggcagggcatcggtggcacgcgtgcacccgttcaccataaaattgaactacgacactacatacaatgtacggccggtcatcctcggcatcgacccggggcggacgaacatagggctgtgcgccgtaacggaggcggggaaaccgctgttcaccgcggaggtgcggacgaggaataaggacatccctggtctgatggcggcgcggaaggcattccgtcaggcgcacaggaagcacaggcggagagagaagcgccagaggcgcgcactggcaaacggaacggcgctgaaggacggaaagatcgagcggcggcttccctcgtacgggaaggacaggaccgtcacatgtaaggtgatcaggaataaacaggcgcggttctcgaacaggaaacgccctgacgggtgtctgacgcccacggcgtcacagctactgcggacgcatttaaacctcgtaaggaaggtggcggggttcctccccgtttcaaaaatcgtgctggaactcaataaattcgccttcatgaggctggacgacccctcaacgcacggcgacatgttccaacgcggcccgctgtacggctatgacagcagcgttgagtccgcagtgtacgcccttcaggacgggaagtgcctgctctgcggcgaacccatacaacagtaccaccacgtgagggaatgcaggcgtgacgggagcgagaccgtgaggaaccgcgccgggctgtgcacggcatgccacagactcgtgcacacggacgaagcggcgcgcggaaaacttgcatccgtcgcggcgggcatgcggaagaagcatgacgcgctgggcgtgctcaaccagatcataccgcacctcgtggaagggctgtccgtggattatgacgtgtccgcaacggcggggtgggagacgaaggagttcagggaaacccacaatattccgaagggtcaccacctcgacgcctacgccgtggcgtgctccgcactggaaaactttgaagtgtgtgttcccaatgaatgttaccacatatgccagttcaggaggcatgacaggaaggcatgtgaacgtgagatgtacaacaggaactatgtccttgacgggaaggttgccgcgcagaacaggcacaaagccatggggcagaaggcggacagcctcgaagaatatatcgcaaagggcgggagaaccgaccgcctgaaggtgaagcatgcccgcagggcgatgaaggacatggcaaggcattaccccggctgccaggtggtacataacggcaggataaggacgctgctgaagcgggcgtcggggagctactggttcgacgacggttcgaaaagccccgtccgtaagacggatgtgacactgaacaattcggggctggtgtttgtatcaaacacgttagcttaa

SEQ ID NO: 1015 - DNA, 258 bp, Mouse gut metagenome
ataaaatgattccgtgcaccaatattccgttacataatgacccggcttgtggatgaggtcattttctgaccacatccacgggtcgggtacaggcatattctgacggcgtcggtcgtgccccttacggccgtggcacccgcggatggtttcccagtccgcagcactgcagagccggcaggaagccgggggagacattacccccgcgcaccagcgcggggagtttacattccatgtaaaggagacaagtaaatggtatat

SEQ ID NO: 1016 - DNA, 1509 bp, Unknown
  Ga0223845_11796712 JGI
ttggcgaagtggaacacgtgcggatgcacagaacccgcctggacatatgccctggcggaagacgtaagtcattgcaaccgtttgtttaaggaaaggagggcgtcagtggctgacatgagagatgtcgcggtgatctcgaagacaggcacgtcactgatgccgacgtcggggtaccgcgcaaggaaacttcttaagaagggaaaggccgttatcgaaaaataccgccctgtgttcaccatccgccttacagaacgcgaggacggtgaggtgcaggacatggaactgaaggaggatacggggtacctgcatatcgggatatctgtctgttccgaaaaacacgaacatatgcaccgtcagtacgaccttctgagtgatgaggtggagaaacacaacgaccgtctgaaatatcgcaggacgcgccgtaacagaaaacgttacaggaaaccgcgctttgacaacaggaagagtcttatcacaaaagacggttttgcgccctccatcaggaacaggcgtgacaggcatgtggatcttgtgcgtgagatatgcgcggtaatgcccataaagcgtgcctacatcgaaatgggacagtttgacacgcaggtactgaaagctgttgaactcggccttccgatacccgaaggggaggattatcagcacggagaacagtacgggttcatgacactcagggaagcggtattcacaagggacagccatacctgtgttgtctgcgggcgctccgttaaggaaggcgccatccttcacgaacaccatatcgggttctggaaaggcgaccgcaccgatcgtccttccaacctcgccacggtctgcgaaaaatgccacacgccttccaaccacaggcctggagggaagctgtatggcatgaatccggtcatgaagcccctgaaggaggcgacattcatgacgaccgtgcggtatgacatgctgaggaggatgaaagaatccgccccgcacgtggcattccatatgacatacggcgcggcgacaaagctgtcccgcagaaatctcggcattgaaaagacacacgcgaatgacgcgtatgccatgggaaaataccatccgaaacaccgtgcgcgccaggaaacgttccggaagagaaggcgaaacagccgtgtactggaaaggttctatgacgcggtgtacatcgatacgcgggatggccgtaagaagaaaggttcagagcttggatgtaacaggacgaaccgccgtgagacgaggatgtctcccaaaaacgaacgtatctttcacgggaagaaggtttcggcgggacaccgttccatcaggaaagaacgtacacgaatcacacccggaagcctggtaaaatacgacagtgaggtgatgaccgtaaaggggatccacagccccgtttcgggaaccaatgtggaattcgcaaagcccgcgtcaaacggaagaaaatccgcctctctgaaaaagctgaaagtactgaaagtaaacctgttttcaggatgggagcgggtaaacactttataa

SEQ ID NO: 1017 - DNA, 402 bp, Unknown
  Ga0223845_11796712 JGI
gtcaactgaccacctcccatgcggtgaacgtcccggcgttcatcctgtggaaggggcttgcgggaagaaattttcgtgagtcggttgattagctgagcaggaacaggtcctggtggaaaccgttcctgctgcacttcaaaagagtgtaagtgacttccatgtgtttacagacagaagttaccggaagagaactacgttgccggcgaaaatacaggcaccatgggatactccacacgtcccatgcaactgcgccgtggcattaaacatccctgagggtcaggggaagtgtgctgcggatataaaaccgtcggataacattggcgaagtggaacacgtgcggatgcacagaacccgcctggacatatgccctggcggaagacgtaagtcattgcaaccgtttgt

SEQ ID NO: 1018 - DNA, 1272 bp, Human oral metagenome
atggtgtatgttatttcaaaatacgggcaaccgcttatgccaattcgtagacacggtaaagttcgaagattattaaaagaagggaaggcaaaggttactcatagagaaccgttcactattcggctactagttgaaactgaaagtaatgtatcagatttaacacttggggttgatacaggttcatcaaaaataggttgtgcagtagttacatcaaaagaagaggttttatatttatcagaagtaaaaatcaggaatgatatatctgtaaagatgaaacggagagcaatatatcgtagagcaagaagaacaaggaaaactagatatagaaaatcaaaatttctaaatcgtggtaattctataagaaaagatagatttagtcctactatgacaagcaagattaactcacatattagagagattgagtttatcaagtctatcctgcctattaaatatttaataattgaaactggaacgttcgatacgcatttacttaaatatgaaggagaggcgttcaatcgtcattggggatatcagaaaggtcaaaattacagattcgctaattcaaagtcagcttgtttaaatagagatagttatacttgtcaatgttgcaaaactaaaaaaggaacacttcatattcaccatattgtatatcggtcaaatggtggcgcagatactttagataatctaattactttgtgtgcagattgccataaaaaacttcaccgcggagaacttaatgactttgaaagtaagttagctggtaagaaaaaggggaaactcaaacacgctacgcagatgaatagtattagagttcaacttttaaaacattatccagaagcaatcgaaacatttgggtttataactaaagaaaatagacaacttataggcttagagaaaaagcattacaatgacgctgttgtaatagctactggatgtttaaataagcctaagtttttagtggatgttgtgtataagaaaatatgtattgcaaaaggtcggtaccgattacatcaaggtcagcgttcagaaatgaagctcccaagaggaaaggtcgaaggttttttaaataaggacattgttaaatatagaggttgtaattatttaattaaagggttaataagtcgtggtggttattgtgcattgatgaatattgatggcattacacagagatttgagaatccgaaaaatgttaaattaaacaatcttaaaagagtgtccgcaaggagtacaacaagatgtataagccagaaaatcattccaaatatagcttaa

SEQ ID NO: 1019 - DNA, 328 bp, Human oral metagenome
gtgacgctgcactcagctaaaggccgagtacctttaaggtacgctgcgtcaacagattgagctctcagaaatgagggctacgatagttgagagaaatacatacacacctgcagttgtcgcctcagactgctgctctgtgactactaattaagtcgagaggaaagtgctaagtctctgtgttagtagtttaaaaacctcaattatcattgtcgagaggaagtcggattcttatcttggttacagagataagatacgcactacagttgaaaacgaactggtgtataacattaaatcgttttaatctaagaaaggagccgtagatactatg

SEQ ID NO: 1020 - DNA, 1299 bp, Unknown
  Ga0256407_10001717 JGI
atggtttatgtacaagacttcgacgggaatcctctgatgccgactgaaaagtacggcagcgtgaggatcatgctcaggaccggacgggccagggttgtgaagtcatgtccgttcaccatacagctcacgactgagaagcgacgctatacccagcccgtgagccttggggtcaggtgcggttcccgccgtatcggcctgtcagcgacgacggagaagaaagaacttctgtgcgctgccggtgaacttaggactgacatcgtggatctcctgtcaacacgacgcgaatcccgccgtaccagacggtcaaggctccgtcacagggaagcacggtttgacaaccgcgtcagcaccaagaaggaaggctggctgccgccatcggtgaggagcagaatggacttccacctgaagatggtggactgggttcgcaggatccttcccgtgactacggtcacttttgaggtcggctcctacgacatccagaagatcaagaaccccgacatctcaggtgagcagtaccagcagggcgaacagctcgctttctggaatgtcagggagtatgtgcttgcccgcgacggccacaagtgccagcactgcaagggcaagtccaaggatccggttttgaatgtccaccacatcgagagtcagaagaccggcggcgatgccccgaacaatcttatcaccctctgtgagacctgccataaggcataccataggggagagattgatctgaaagtccgtcgtggcaacagcttcagggatgcagcagccatcaatgtggtgaagaacgctgtgtaccgcaaggctatacagtctttggatggctgtagtgtctgcaggacatacaggtatgtcacgaagcacagacggataaatgcaggtctggagaacgacagctacactgactatagggtcatcagcggtaatctggcggcaatggtttctgacagtgtattcgcgcttcggcagatacgcaggcataatcgccagatccacaaggcaaatatcctgaaaggctgtcgtctgaaaaagaaccaggcaccctatctggtgttcggctaccgcctgaacgatattgttctcttcaagagtaaccggtgtatcatcaccgggcgcaggagcagcggtagttttgccctgaaggacttggaaaccggagataggtatgcagctgtcagctacaagaggttgtccttgttacaagtctgtaacagaactgtagtgtttaaccaaaaaagaggaatgtccggcgtttcctcagcccgcctgaagacgggagtatccacgccgaatgaatcatga

SEQ ID NO: 1021 - DNA, 278 bp, Unknown
  Ga0256407_10001717 JGI
gtcagccacccacccctgaagggatgagcttgtaacagctccagctgattagacggcactctaatgtgcagccgttacgggcgaatatacaggcacctttggatgttcttccaagtccgaagctctgcggccagtggttaaacagtcctgggaggtagggacagtgctgctggcacacaaaccgcccgataacaacgtcgatgggagcattaccctccttctggaggagtcatctgccaaaaggcagtatttttaaacgactaaaaaagtaaagtatg

SEQ ID NO: 1022 - DNA, 1479 bp, Unknown
  Ga0223824_10002447 JGI
atgtatgtagtttatgttttagacaaagacggcaatccactcatgccaacaaaaagatttggacatgtacgtaagcttttgaaatccggacaggcaaaagctgtatccactaaaccttttgtgattcaacttttgtacgagtccactaaatttactcagtcactttatggcggaactgaccccggcagaaccaatattggtgaagctgtggtcaaccagaagggggaagttgtctatgctgcgcatgtcatcacaaggaataaagatattccaaagttaatgactaatagagccgctcatcgcagagcttctcgtcgtggcgaacgactccgtagaaaacgcagagcgaaaaccaacggtactttaacgaattttcccgacgggcgaaagctacctaaatataaggatggggttctagtgctgaaagacattattaatactgaggcgaagtttgctaaccgcaaacgtcccgctggatggttaacaccaacagcaagacaatgtgtgcaaacgcatattaatatcatcaaacagatttgcaaaatcttgcctgtaacaaactggacactggaatacaacaaatttgctttcatgagaatgaatgatggctccgtaaaaggcatggattttcagaatggtagaatgaaatgtttcgccaatgttaacgagtatgtctgttcattacaggacggacattgcgtcctgtgtgatggtaagattgaccattaccaccatatcgtacctcgtcataaaggaggtagtaatactccggagaatattgttggactatgcagtgagtgtcactctgaaatacatcaaaacaaagttacccttgatgatattggtcttaaaaagaaatatgctggtacgtccattgttaatattgccatgccatatatttacgaagagttattaaacatgtttagtgaggagcattttcacgtttgtgatggctatgctacctcaaacaaaagagcagaaaataatattgacaaagagcattctgctgatgctgcttgtattgcagcaattggcagcaatgtcaatcttaaatatgatatggaaaatatctttgaaataaggcaatatcgcaatcatgatagagctatcgttaataatcagcctgaacgaacctataaagtaggcagaaaggtcgttgccaagaaccgcaagccacgttttgagcaagataagaaagtgcctgctataagtgattggtatgaacagctttgcgacgaaatcggctatcggcaagctcgtatagcattatcaaaagttagagttataaagtcgtatcgcagatacaacgatactaaaagaattctggccggtgcgatattcctgtttcaagataaaagatatgtccttaccagcagccttacaaacggacaatattacagagcttatggatatggacaaaagaatttttcagctcgaaattgcacaattgtacaacgaaaatctttagtatatgtttag

SEQ ID NO: 1023 - DNA, 223 bp, Unknown
  Ga0223824_10002447 JGI
gtcaactacctctgctttatgcttcgcatttgaagcaggggctttttcgagcccctagcagacgtagttgagcagagacatgacgtagcaggattaagttccgaaacaccgggggtgatgccaagcctccagctctgtgcgtagctacgccgagtctatggcaatctaacttcgtgacgactgtcacgaagacttatctcaaaggagatttcaaatgtatgta

SEQ ID NO: 1024 - DNA, 1365 bp, Unknown
  Ga0307929_1001023 JGI
atgttaagtaattcagtatgcgctttaaatcaaagaggtaagccgttaatgccttgctctcaaagaaaagcaaggcttttgcttaaggcaaaaaaggcaaaaatagttgctcatagaccttttactattcagctaaattatgccactggggaaactaaacaatcaattaccataggcgttgatgctggttacaaaaatgttgggatctcaattgtaagtcctaaaaaagaatttttatcaagtgaaattcaattgcttgaaggacagattgaacgaaacaaaaagcgaaagatgtaccgaaataacagaagaagtcaattgaggtacaggaagccaaggtttgataaccggaaaacgcccaaagggtggttggcaccaagtattgggcataaatttgatagtcatattaagtttattgaacacttaaaatcagtctttccgattactgaagtgattattgaagtggctacctttgatattcaaaagattaagaatacagatataagtgagactgaatatcaaaatggtgagcaaaaagatttctggaatcttcgggaatatgttttccatagagattaccatcaatgccagagtctaaaatgtcaggaaaaggaaaaacaagacaaaaatcagatattaagaacacaccatattggtttttggaaaaaagatagatccaataggccagggaacctaatcactctttgcactaaatgtcatacacctaaaaaccataaaaaaaagggtatgctgtttggttgggaacccaaggttaaatcctttagacctgaaactttcatgtcaacggttgggtggaaaatggtcaatcaattaaaatgcaagcatacttatggttatcaaaccaaatcaaaaagaattaatcaaaagcttgaaaaaactcattatactgatgctttttgtattgctaatggtactcatcaagaacgaaccgcaccaataatgtttaagcagaaaagaagaaataaccgaagtttagaaaggttctatgatgctaaatatattgacattcgaacaggtacggttctcaaaggtgctgagttacattctggtagaacaaccagaaacaagaatctcaatagtgagaatttaagaaaatatagaggggaaaaaaagtcaaaaggaaaaagagtgattcgaaggcagagatatctttttcaaccgcatgatttagttgtgtacgaaaacaaaatttggaaagtaattggtacacataataagggagcttctgttagaattacaaatggtcaacaaacgtttagtcgatctccaaagaaactcaagcataaattacatattaattcattaattttaacacaggaggtggcaattcctcccctgagctaa

SEQ ID NO: 1025 - DNA, 303 bp, Unknown
  Ga0307929_1001023 JGI
gtcaacaacccctgagctaaagactcaggggcttgcaaagtaacttttgcaagcctggttgattagcctaagttttaattaactacgttactttagaaaaatataggcacctttagatactccactcgtctgaagctctgcggttagtgtttaaacatctctgagggtaaggagaagtgatgctgacaaccaaaacctattgtaacattggcaaagtggacaaattatcttcggatgaggacaggacttgagagtacccgtcaattttttagaaaaagtaggtaaaaaatgttaagtaattca

SEQ ID NO: 1026 - DNA, 1401 bp, Unknown
  GENOME_ACESSION: mgm4530144.3 MG-RAST
atgggagatgtaggtatagtccaacctacacgtcacccagcactgctggaggaaggaggaaaactccatatggtgtttgtgttgaacagggataaaacacctttagcaccctgtcacgaggcagttgcaaggaaattgcttaaacaaggaaaagcagttgtacacagaattttccctttcacgataaggctcaaagaacagaaggatacatcaatgtttaaaccagactacagactcaaaatcgattatggaagcaggcatacagggattgcaataatcaaaaacaactctgaagtaattttcatgatgcagctacatcataggacagacgtaaaagaaaatatagatagaagacgtgcattccgatgtagcagaagaaacagaaaaacaagatacagaaaaccaaggtttttgaacagacgaagagatgaagattggttaccacctacactacagagcagggtaaacaacattgcaacgtgggtaagaagactttgtgagttgtgtcctattacagtgatttcttatgagaacgtcaaattcgatacgcagttgctaaggaatccagagatttcaggtattgagtatcagcgaggaacgttgcaagggtatgaggtcaaagaatacttgcttgagaagtttggcagaagatgtgtttactgtggtgctacaaacgtaccacttgaagttgagcatgtaattccaaaatcaagaggtggaacaaacagagtagataatcttgttatagcctgtcatgaatgtaatcagaagaaaaggaataagacagcggaagagtttggatatccagaaattcagcaacttgtcaaagaaccattaaaggactgtgcagtagtcaacactactagatggaagatctacaaggttttgaaggcaactggactgccagtagaatgtggtacaggagctactacaaagatgaacaggctgagacttggtttacctaaagaccatcattttgatgctgtatgtgtaggacattctacacctgacaggatttggttcaagacaggaactgttttgcacgtgttagcaaaaggtagaggcacaagacagattgctgtgcttgatagatatggttttccacgagggtatagaactaggaagaaatgtttttatggctttcaaagcggagacatagtaagagctaacgttccgaaaggcaaatacaaaggagtatggacagggatagtagcatgtagagaaagtggatattttgatataaagaacagagctggaaaaaggattgctcaaggtatttcatacaaatattgcaaagtagttcagcggtttgacggatattgttatgagttggaacaaacaaaaatatctggcacatttcctctccaacctgtagaggttggagcctccatgtgccagtag

SEQ ID NO: 1027 - DNA, 290 bp, Unknown
  GENOME_ACESSION: mgm4530144.3 MG-RAST
gtcaactaccacccgtctgtagaggcggaggcttgaaagagccatggttgaccagcccaaggaactgacctgaaggacaagggaatgatgttcctacgttatccctgtcagggcactctggggtgcgtcccaagctccagacactgccgtgcagacttaaacagtcctgagtggtagggacagtggtctgcacatggcaagcagggataacatgggcgatgggagatgtaggtatagtccaacctacacgtcacccagcactgctggaggaaggaggaaaactccatatg

SEQ ID NO: 1028 - DNA, 774 bp, Metagenome
gtggttgagcagaagcatggatggatacgtgtcacaaggcaggcactgccggattttcccagttcggcacaatgcagagtgtccacccagcttagggaaacagtacgacaaggtgtgcacaggtttacaaccggtgccgtccgatgcgctggacggcggtactgcacgcagcatttaatgaaacaaaaaggagggcatcacatgccggatacagactacatatatgtgcttggcagggatgggaaaccgcagatgccgacaaaaagaaaaagatatatcaaaaagctgcttgatgctggtaaggcaaggattgcctgccttggtgccggtttgataccggcggcagcccaggggtttacctatgtacataaaatcgtacagttccggagacatgaccgtgcaattatcaataaccagagggagaggacatacagactcagtggaaagatcattgcaaagaaccgcagaccacggtttgaacaaaagtgcccatcactttccggctggtatgaagaacaggttaaatgtcatggccggaaggaggcagaccggatgcggtcacagcttaccgttgagaaaagcacaagacgttacaacaatccggaccgtctgatgcctggtgccctgttcgaatacatgggtgaataccatgtattgtccggacagttgtcaaacggccagtatcttcgtgcgtatggtgataagaaaacaaactacccggcaaagaaatgccggatcataagacacaacgaggggcttgtatttgttgcgtag

SEQ ID NO: 1029 - DNA, 198 bp, Metagenome
ataaggtaggaaaggcaggggaagaagaggtgtgattatggcagaaagaacagggaaaaagaaaaagactccgatgtatgcggaccggatcggcggtgtccgtccggtgtatgcatgcccgtcatgtggggagcatctgtttattccggatatctgcgtagcgtgcgggcagaaaattaaatgggatagttaatgtgt

SEQ ID NO: 1030 - DNA, 1341 bp, Unknown
  Ga0310691_10013239 JGI
atgactgtattcgttcaggacataaacggaaacccgctgatgccgacagaacgctgcggcatggttcgccgcagaataaaagaaggcaagatgtctattgtctcatatgaaccgttcacggttcgactgacatacgacaacgggaagaattatgttcaggaatgtactctcggcattgactcggggacgagtcatatcggtttgagcgtcactactgaaaagaatgaacttttcagtgctgaagcagaagtaaggacaagggaagtaaaagacaaacttaaagaaagaaaagaaaacagaagacacaggagatgtaagaaccgtcgctacagacaagcccggttcaataaccggactcacagcaagaaagcgggatggcttcctcctactgtttggcagaacataaacacatacactcttttgataaaaagagtgagttctattcttccagtcagtaaaataatatttgaagctgctgactttgatacacagaagatgtgcaatccagatatctccggggaagaataccggcacggtcagatggaaggccatctgaacacaagggagtttgtattatggagagacaactatacttgtgccatatgtaataagaatgctttcactgacaaagtgaaagttcattcacaccatatcatatggaaaacaaacggaggttctgacagacctgataatcaggtctgtgtatgtgagaagtgtcacaacaagattcacaaaaacaaggcacatctgccagagaacctgaatatcaaagcaaagactgctttgaagttaagggatgccggactgatgaacaacataaagtggcaagcagtcagggaaatcaggaaaacatttcctgatattccggtgaaagtgacatacggatacaagacaaaatctgtcaggtatgttcataacatagagaagtctcatgcaaatgacgcatacgtcatttccggaaatatcaatgcgattcattcagacagaatctatttgtacagacagaaccgtcgtcataagagacaacttcaggactttgcaccgagatcaaggagagacaaggatgggaaattcaaaatgtcaagaaaagagagaaagaaaagaggatatgtgataaaaagatgtaaggagataaaggagatatacggcttcacgaagcgaagcctcgtcaaatacaataataagttattcactataaccggtctcagagcgaccgggaatttctcactcagaaacaccaaagacaaaactgaatcaattgattcagtttcacacaaagaactcaaattgataagaaaacaatacaaatcattgtatatagaaaatatcaagaaaagataa

SEQ ID NO: 1031 - DNA, 341 bp, Unknown
  Ga0310691_10013239 JGI
gtcaccaaccgccgggtctgaagaacccgcggcttggctgaccggaaggtcgacacaggctgatggtgaataccctaagtctacggagacagccggtcgatgaccggcacactcccaggctacgttacttcagaatatatagtcactatcggatgtttgtccaagtccggtactctgaggcagataactaaacagttctatgcggtagggacagtgagtctgcatacaaacctgaggataacattggggatgggctttcaccggagcaattccgttgctccgtgtacttatggattagtttccatttaaattaaaaaaaaaacaaaagaaagaaaatgact

SEQ ID NO: 1032 - DNA, 642 bp, Unknown
  Ga0117908_1060975 JGI
atggtgtcgggtgttgcctgcgtaggtaacggagaaatccttttctctgctgatatcaaacatagaaatccagtggcattgcaacagaaagatggtttcaagacatttgtgcaagtccgagcagaaagacgcagagcacgcagaaaccgtcatagatggcacagaaaagcaagattcaataatagagcatcatccaaaagagctggtagattgcctccaactattaagatgaatgtcatggaagttgttagagttgtcaggcaaattcctctcccaatttcccatatcaccgttgaagatgttgctgtggatattaggagattaagcaatcctgatgtggaagggagtgaataccaacaatctaatcggctggacgagaatctaagacttgcctgcctgatgagagacaacttcacttgtcggaaatgtggtaaaaaggaaatcaaactcacatctcatcatatagtttggacttctaaaggtggcaaagatagtatttacaacttgataaccctttgcgagaattgccatgaaaaggtacactctacgggagaaagcggcaaaatcaagctcaaaggcggcaaagtaacgacaggctcggaacgaagtggagaggtttcatccgatggatggtttttctga

SEQ ID NO: 1033 - DNA, 288 bp, Unknown
  Ga0117908_1060975 JGI
gtcaatcacccctcctgattccgagaatcagaaggggcttgcgtagacaatgcgcaagccccaggttagaccagcccccttcatctacgaggtgaaggagaagttacctgttgtatcacaccctgggatgtgcttccagttccgatccataaggacacggctctgtggcttattcgtaaacatttctgtgagggtaggaagagtcgaataagcgtaaaaacacaggataacaggggcgaggaggaatttactctttacacgtaggaggttctaacaaacataatgcgt

SEQ ID NO: 1034 - DNA, 1008 bp, Unknown
  Ga0117908_1013265 JGI
atgttacaaagagtaccagtattacaccaagacggaacaccactgatgccgtgcaagccagcaaaggctcgtaagttactacgtaatggtaaggctgtcaagcgctggacaagagaaggtgtgttctatattcaacttacttgggatagtacaaaacgtactcagccgatgtgcttgggtattgacccaggcagtaaattcgatgggtacgctgtgctaactgaccaggagattgtgacctccgcaatggcaatattgccagacattacgaggaaagtaaagaacaggagaataatgcggaggtctcgacggcagcgtaagaacagacggcgcaaggtacgtcggaaagatacgaagaaggctggatggattagccctacacaaagagccaaagtggaattcagactaacgctaattaggagatacctgaagttatatcctattacctactttgctgtggaagatgtacggttcaatcactacaagaagcgatggggtaagcacttctctggtgttgaaatcggtaagactatgctttatatcgaattggagaagtttggcactctctataagttcgagggttggcaaacaaaggaactaagggatagagatgggttgaagaagagcagtagcaaagacaagttgagttttgactcacatgcggtagatgctgctgtaatagcaggagaagtaatagggtatgtaggtgattataatgtaccagagttctgggtattcaaacgccctaatctacgaagacgttcattacacttgcagaacccgcagaaaggtggaataagacgggtacatggtggaacatgggcattaggtattaggaagaacactgtgtgtatctggaaggatggcgtatatcgcacaggtggttcaacgaaaggtcgattaagtctgcacgatatgtcaatcaaagcaaagcgagtaacacaaagtgcgaaggtagaagatttgatgttactataccaccagactatttacgcggaaaggatgtag

SEQ ID NO: 1035 - DNA, 298 bp, Unknown
  Ga0117908_1013265 JGI
gctaaaattgaccttcaactcgcacttgacagcatgaatggagatatgccccccgaacttatcgctatcgacctgaaaggcgcactggataaacttggaataatcgtgggaaagacaagtacggacgatattttggagagaatattttctaagttttgtattggcaagtgagagtcaataacccctgaattcaatttaggggcttgtgggaatgctaccacaagggtaactgttgaactatgactcagctttagctacgtgtttgagccaaggtggagcgatatagtcgggtacaaag

SEQ ID NO: 1036 - DNA, 708 bp, Unknown
  Ga0137372_10037833 JGI
ctagacacgaacaagcagccactcaacccggtgcatccaggacgtgcacgtttgttgcttcaagcagggaaagctgccgtgctcaagtactacccatttactatcatcctcaagagcagtggagagcagccacaggtagagcccttgcgcatcaagctcgaccccggcagccgcaccactggcatagctcttgtcaacgaccggagtggccaggtgctttttgcggctgaactcacgcaccgaggccagcagatcaacaaggcgctcgacgaccgccgagcggtacgcagaagccgcaggcgtcgacacagcagataccgcaagcccagattcgataatcgccgcaggccacagggctggctggccccttccctcatgagtcgagtacacaacgtggtgagctgggtacaccgactccgaaagctctctccgatcacagccatcagcatggaattggttcgcttcgatctgcaaacgatgcagcagccagggatcgagggcatcgcgtatcaacaggggacgcttgctggatacgaactcagagaatttttgctggaaaaatgggggcgtgcctgcagctattgtgggaagcagaacatccccctccaggtcgagcacatggttgcgcgtgccaacggcggcacgaaccgcgtcagcaatttgtgtctctcctgtgaaccctgcaatacacgtaagggtacccaggac

SEQ ID NO: 1037 - DNA, 271 bp, Unknown
  Ga0137372_10037833 JGI
gtcaggaacccaatccccttttaggggatgggcttgtttcggcaagctcacctgaccagactcagctagcccgctagctacgttcagagcgaaataggtacgtcggggtacgttgccagcctcgaccgctacggtgcaaggttaaaaggtgtacaagggtcaagccggtgctttgcacgccaaaccgcttatgaacattgtcaaggcacacattaccccggtcacacgggaggctcgtaagagcacaccaaggagttatccagtgagtttc

SEQ ID NO: 1038 - DNA, 1299 bp, Unknown
  Ga0137380_10001296 JGI
ttgagcaacgtctttgtcttagataccaaccaccaggcattaaaccctgtccatccggcgcgagcacgcctgctgctctcctgggggcaagccgccgtgtttcgtcgctatcccttcaccatcatcctgaaaggggctctcgaccatcccgttcttgcccccttgcgtctcaagctggacccaggcagcaaaaccaccggaatagcgatagtcaacgatgcgacgggggaagtcgtctttgccgccgaactcacgcaccgagggcaggccatcaaagagcgtctggatacgcgacgggctgtccgccggagccgacgggcacgcaaaacacgctaccgcaagccacgctttgacaaccgacgccgcgcatcggaatgggttcccccttctcgcgagagtcgtctctccaacaccctcacgcaggtcaagcgccttatgagcctgtgtcccatcacagctatcagtcaagaactcgtcaaatttgacctgcaagccatggacaagccggagattgccggagccaactaccaacaagggacgctggccggatacgaactgcgagagtacctgctcgaaaagtggcagcgtcgatgcgcctattgcggcaaagacaacgtgcctctgcaaattgagcatattcatcccacaagcaagggcggcacgaatcgcgtcagcaatctcacgctcgcctgtgagccctgcaacatcgcgaaaggcacgagggatatcaaggagtttctcgcgaacaaaccagacgtactcaagcgcattctcgctcaatcaaaagcaccgcttaaagatgcttcggcggtcaatgccacacggtgggaactctcccgacgcttgcaagcattaggcttgccggtagaatgtggcagtggaggactgaccaagttcaatcgtctctcccaaggactcgacaaggcgcactggattgatgccgcgtgcgtgggcaagagcaccccaccgtgtctctctctccatggggtagtgccacttctcatcacggctacaggctcaggcaatcggcaaatgtgcggcacgaataagtacggcttgcctgttcggcatcggcaacgccagaagcaccactatggatatcaaaccggcgatatggtgcgagcggttgtcacctcaggccgacgcgttggggagtatgtcggacgagtgctcgtgcgtgccactggctcctttgatattcaaaccaaacaaggacgggtgcaaggaattagccatcgtttcttcacaccccttcatcggcgggatggctatcgttatcaaaaaggagaggtggtatga

SEQ ID NO: 1039 - DNA, 249 bp, Unknown
  Ga0137380_10001296 JGI
gtcaggaaccccgggctaaagccacggggcttgtgtgaacaagccggaacctgaccagtctcagccgggcaaccagctacgttgggagcgaatgcataggcacgttggggtgcgcggccagccccaacctctgcgacggatggttaaacagagctaacgggttaactcagtgctctccgtatcgaaaccgctcacgaactttgacgaggccaccattaccctggaaacaggaggctcatcttgagcaac

SEQ ID NO: 1040 - DNA, 1134 bp, Unknown
  JGI24023J19991_10009125
atgtccgttgatagccaaggcagtcagcgagctaagcctgcattgcccctcgaagggtgctcaacaggcccacgggagcctggccggataccggcactaatccccgtgctccacaaggacggcacttccctcacaccctgtaaaccggcgaaggcccgcaagctgttgaagggtggcgtagcagagaagcgttggaacaagctaggccaattctatattcagatgttggttgaaacaggcaaggagaggccagagatgtggctggccgacgatcccggctccaagtatgacggattagcgatagcctcgcacaaacaggttcagatggcggtcatgctggagctgcccacaggtattgcggacaagctcaccaatcgtagtcagttgcggcgggctaggcggttcaagctacgccggaggcccaagcgatttgataatcgccacaggccggagggctggattgcgccttcacagaaggcgaaggtagagtttcggctgaaggtcattcgtgagttgtgcaggatctatccgatcaccggctttgtcgtggaggatgtgcggttcaaccattaccgcaagcactggggaaagaacttctctaccgtcgaaattgggaaggcatacctctacgaggagttaaagaagctgggccagctcaagctctacgagggctgggagacacaagaggagcgggatgtgcaggggctcaagaagatcaagtcgaagtccaagcgcgtgctggagagccatgctgtggacgcggtagcaatgctctctaggtggctgggaacgcttgacttacgggtgccggagttttgggtgtttaagcacccgaacctacgcaggcgaagcctccatcttcagaatccagctaaaggcggggtccggcgagtgcatggcggcacagttgctttaggcgttcccaagaatacaatctgcattttgaaaagcaggctctatcgcacagggggttctaccaagggtagattgagcctgcacgatctatcactagaggcaaagcgagtcaggcggaacgcaaagattggagagattaagctgctattcaggcagactatatttggaaaggaggttctcaagggctttgcccttgcgcctgctcctccccatggataa

SEQ ID NO: 1041 - DNA, 221 bp, Unknown
  JGI24023J19991_10009125
gtcagggaaaactggtctagccgagcttcctaatgaggatatatatcgctttatagatatagctaatgtcttttatggacctggtcttaatattgtgtgggttacactgagagcctgggttaaagatccatataatccaaacattgtcaaaccctttcccgctgtggtagaaggagaaataaatctaacagtagagtagtagtcaacgaccccatagctaa

SEQ ID NO: 1042 - DNA, 1386 bp, Unknown
  Ga0079367_1013592 JGI
atgcagcatattttcgtgctggacgccgagagaaagccgcttatgccctgccatccggcccgggcgcgagagctgatgagcaaaagcaaggccgcgcgattccgccagtacccgtttaccatcatcctgagtcagaggagcggaggcgcagtcgaagcactgcggctgaagattgacccgggcgcgaagacgacgggcctggcgctggtcgaggagagcaccgggcgcgtggtgtgggcggcggaactcgagcatcggagcttcgcgatcaaaaagaagatggaggaccgcagcgggcaccggcgcagccgccgcacgcggaagctgcgacatcggcccgcccgttttgagaatcgaacgcggccggaaggatggctggggccgtcgctgcgcagtcgctgcgaggggaccatcacctgggtgcgcagattgcaggagctggcgccgatcacgcacctgagcttcgagcaggtccgcttcgacatgcagaagatggaaaacccggagatctcgggcgtcgagtaccaacagggcacacttgcgggctacgagctgcgcgagtacctgctggagaaatggggccggaaatgcgcttactgcgggcgcgaggacgtcccgctgcagatagagcacatcgtgccgaaaagccgcggcggcagcaaccgggtgagcaaccttacgctgtcatgccccgcgcataatatggagaaaggcaacaggacggcggcggagttcgggcatccggaggtcgaggcaaacgcgaagaagccgctgcgcgcggcggggatgctgaacgcaacgcggtgggcgatctggcgtgggctcaaggaggtgggattgccgctggagagcgggagcggcggccgcacgaagtacaaccgcacgcggcagcgatacccgaaggctcactggattgatgcggcgtgcgtgggcgaatcgggcgagaagatcatcatcgacagcgatcaccggccactcatcatcagcgcgaaaggacatgggagcagacaaatgtgcgcgacggacgcatacggcttccccaagcagcataagagcaggcggaagctgcactatggctttcagacgggggacatcgtgcgcgcagtgctgccgaaggggaaatatgcaggcacccacgtcggcaggatcgtggtgcgcgcgacgggcagcttcgacctgaaagagatggggagcgggcagaagatgacggcgaactggaaatactgcgaagcggtgcaccgggcagatggatatgagtatggcgcagggcaatcccttgaggagcttgtggaggcggcggaagcgtgtcgcgctgcgcgcgacgggccggacggtagtccggcccctccggacggcaacggcgcgtccatacggcagcaatggtga

SEQ ID NO: 1043 - DNA, 265 bp, Unknown
  Ga0079367_1013592 JGI
acatgaacgcctctcacctcgcgcgcgcgcgaagcgcggcacagtcgcgctcatgaggccagcctcagcagccaacgcggctgctaccttacgggcgaatgtataggcactccggggtgcgttgccagccccggacaatgcgggcagcggctaaacaggcacaagggtgtaggccagtgccgctgccgagaaaccgcccgataagattggcgaggcaaacgttacccccttcgggggagaaaggcgggtaaccgccatgcagcat

SEQ ID NO: 1044 - DNA, 1227 bp, Unknown
  Ga0134857_007242 JGI
atgccctgttcgcaaaagaaagcaaggttattactaaaacaaaataaagctaaaataactaactataatccatttactattcaattattagtcccaactggtgaaacaatacaagaatgtaatttaggaatagatagtggtgctaaaaatgtgggttttgcaattacttcacaagataaagtattaataaaaggagaaatagaattaaggcaagacgtttccaaattattaactactaaaagaacatttagaaaaagcaggcgaaaccgcaaaacaagatataggaaagcaagatgggaaaacagaacacgaaaagaaggctggctacctccaagtattcaatcaagaattgataatcaaattaattggattaataaatttatgtcattattgcctaattgtaatttaattgttgaagttggtaaatttgatacggctaaattaataaatccagacatacaaggtgaagaatatcaacaaggaaatttatatgaatatgagaatataaaatcatatcttatagtaagagaaaataacaaatgtcagttttgtggtaaagagtatgatggtaatgggtggcatattcaccatataaaacaaagaaaagatggtggaacaaataaagtggataatttagcacttgtacacgaacaatgtcataaagattatcatttaggtttattaaaagttaaattaaaagaaccaaaggattataaagaaacagcatttatgaatatattaagacaacagatattcaaaagagttaattgtaaaataacttatggtagttacacaaaggttgatagaaatagtttaaatttagataaaacacattataatgatgctattgctataagtgggattaagaaagtcaaagaaaaccctgaacaattattaaaaataaaacaatttagaaaaaagaaaagaagtttgcatgaagctataccaagaaaaggcagaaaagaaaaaaatataactcaaaagagaaatagtaaaaatactaaatgttcaaatgggttttatcttaatgacaaagtaaaagtattagataaggtaggttggataagtggattttgtaatggaggttgttatataaaagatattgaagataattatataactttagaaggtaaaacttataaacaagtaggatttaagaatttagaattaatatgccataataataactggcaatatgggatgttgtgtgtttcatctcatgaatga

SEQ ID NO: 1045 - DNA, 258 bp, Unknown
  Ga0134857_007242 JGI
gtcaactacccacgactgaagtcgtaggcttgtagaagtaattctattaggtctaaagttgactactctaagtcttaattgactacgttagatataatatcacaccataagatgatacccaagtcttatgcaactgtgtaggctctgtaaacagttctgttgggtaggaacagtcaacctaatttggagattttacctcaaactatatctaacattgaggatgggtaaataactctgaaaggagaacgaaacttgaga

SEQ ID NO: 1046 - DNA, 1038 bp, Unknown
  Ga0224514_10000173 JGI
gtgaaatttatacctgtaataggtaaggataaaaaacctttaatgcctaccattccatcacgagcaagaagatggattaaagaaggtaaagcaactcctttttggaagaaaggaattttctgtgtaagattaaataaagaactgtcaaacgaaaaattacagaaagttgtcgttggtattgatccaggcagtaggagagaagcatttacaattaaatccaaaagtcatacatatgcaaatattttatccgatgccgtttattgggtgaaacacaatttggacaccagacgaatgatgagacgtactagacgcagacggaaaacaccatgtaggaaaccaagatttaataacaaacctaaaaaagtatttctatcaccatccacaaaagctagatgggatataaaattgagagtttgtaagtggataattggaatatatccaataacagattttatagtagaagatatcaaggcgaaaaccaaaggaaagaaaaagtgggattgtatattttctcctttacaggttggaaaaacttggttttacaaggaacttgaacgcttaggaaatctttcattgaaacgaggttatgaaaccaaggctctaagggacaaattggatttagagaaatcttcagataaaaaggcagaaatatttgaatcccataacatagactcttgggttttagcaaatgagatcgaacagggacatgaagcaccagataataaagaattattgagattggtgcctttgaggaattataggcgacaattacatatgtttcagccatctaaaagaaatatgaggagacgggtaggtggaacaattagtcttggattaaaacgtggatctataggaaaacatatgaattatggattggtctttataggagggtattgtaggaatagaattagtctacatgaaccaagagcacataaaagaatttctcaaagtgccaaattggaggacattcatattttaacaaataatagttggagaattatagatttgggagagaaagatggatattataggttgtga

SEQ ID NO: 1047 - DNA, 241 bp, Unknown
  Ga0224514_10000173 JGI
gtcaactatccaaaaattggatctgagaatcgagaccgacgagtgtggatcagattaaacaggagactagagtgaccaagttcagaaatggacgtttgaaggaaactgaactatctgtccgtggtagggtgaaagacgttatgagtgcttccctagcttatatcctctctgatggtcagtctcgaagggaaaatacatactctgtgaaaggagacttatagtgaaatttatacctgtaata

SEQ ID NO: 1048 - DNA, 1104 bp, Unknown
  GENOME_ACESSION: mgm4547164.3 MG-RAST
  MISC_FEATURE (415)..(552): Any "N" represents any nucleotide
atgctggtatatgtattaaactcaaacggacagccccttatgccgacaacgcgctgcggcaaggttcgtaggctattaaatacgaagcaggcaaaggttgtcaagcgctgtccgttcaccatacagtttttgtatgatacaacgaattgtgtacagccgatcgaccttggaatcgacgcaggatccgaacatatcggaacatccgcatgtacggagagaaaggaactgtacgcatccgagattcagctgcgtaccgacatcacaaagatcctttcggaccgcagacagtaccgccgatccagaagaaacaggaagacccgatacaggaagccgagatttctgaaccgcgtacacgcaaagaacaaaggatggctcgcgccttcggtcgaagcaaagatatccgctcacctgaagnnnnnnnnnnnnnnnnnnnnnnnnnnnnnnnnnnnnnnnnnnnnnnnnnnnnnnnnnnnnnnnnnnnnnnnnnnnnnnnnnnnnnnnnnnnnnnnnnnnnnnnnnnnnnnnnnnnnnnnnnnnnnnnnnnnnnnnnnncctcatccggaaggaacggactaccagcaaggagaccagctcggcttctggaatgtcagagagtatgttcttttcagggacggtcatacctgtcaatgctgcaagggcagatctaaagacaggatcctgaatgtacaccacattgagtcgagaaagacaggcggcgattcgccggacaacctgatgactctttgtgagtactgtcataagcagtatcatttgggaaagatcaagcttccggacagtattaaacgaggccagagtcttcgggatgcggcattcatggggatcatgcgctggacgttctacaacaggctgaaggaactgtaccccgggatagtatccatgacatacggatacatcacgaagaatacaaggattcgtcacggactggagaaatcccatgcggttgatgcgagatgtatttcagggcatcctgatgcaaatccgttggggtttatctactttcaaaagaaggtacgctgtcataacaggcagttacggaaagccaacaccttaaagggcggcattgttaaatctaaccaggcggaa

SEQ ID NO: 1049 - DNA, 313 bp, Unknown
  GENOME_ACESSION: mgm4547164.3 MG-RAST
gtcaactacccaccacttaaaccctaatgggttttgaagtgggggcttgtgacgaagttcatcttcgttataagtccggctgactaccctcagtctctccgagagactacgttactttggtcatcacacctgcggacgttcgtcctaatctgcagctctgtggttcgtcattaaacagtcctgacgggaagggacagtgtggcggacgcaaaaagcctttgtaacattggggaaggacaccttacggttagtacgcaccggcttacagcattaagcgtaccgataatctacgaaaggagtcgcggttatgctg

SEQ ID NO: 1050 - DNA, 1251 bp, Unknown
  Ga0209992_10008281 JGI
atgcttaactcaaaaaaagcggcagtctatcgacgggcaccttttacgattattttgaaagatcgatctgagggtgacgttcaacctgtccgtgtcaaaattgatcccggttcaaaaacaacgggtattgccgtggtgggagaatttcccaagcaaggtaatgttgttttgtggggggcaaaccttgagcatcaagggcaagcagtcaaaatgaggttaaccaacagaagtatgctcagaaggggtagacgtggacgtaaaacccgataccgtccggctcgatgggaaaacagagcaagacaaccggtcacttatgacaaatggctacccccatctttacgttctcgattagataacacccgttcgatcattagtaagttaatggataggtcaccagtaacggatttctctgttgagattgtacggtttgatatgcaaaaaatacaaaaccctgaaatctctggtgtggagtatcaacagggtgaattgatggggtatgaagttaaagaatacctgttagagaaatggggacgtaaatgtgcttattgcgataaagaaaacgttcccttacagactgagcatattgttcccagagcaagtggcggtacgaataatgtctctaatttaacgattgcttgtgaaccttgtaatcaacgaaaagataatcagaatgtcgaggtatttcttgcccgaaaacctgagaaattagcacgactaagaagacaaatgatatcgactgtaaacttgagagatgcggcggcagttaatgcgtctagatggtcattagcgaactatctacaagatacttatggactacctgttgaacatggatcaggtggacgtacaaaattcaatcgtgctaatcaatcgattgataaagaccattggaaagatgcggcttgtgttggtgaatcaggatcatccatttttattcctgagtctcttaatccattaaccattaagacacggggacgtggaaatagacaaatgcaacgtgtggatcgttatggctttccaagaagtagagcacggtcaataaaacgtctacatggacttcaaactggtgatattgttcgattagatcaacctagtggcaaatatcagggtacttatgtcggtcgattatctgccattcaatcccaaaatggaggacgggggacaataaaagtaaatggtaatagtattattactaattggtctaacttcacacgacttcaatgcatcgacggatatgaatattcttatggttaa

SEQ ID NO: 1051 - DNA, 357 bp, Unknown
  Ga0209992_10008281 JGI
gacaacgttgtgactaccctctgtttttaggggacgaacaacgcgatttcttgggaagtgacctcaacgagggttgtgactaccctctgtttttaggggacgaacaactggtgtttactaagtgtttgtttttgaaaacagatgtcgcaaccagaccactcagaaatgagtagacgatagggatgaaataggtacgttagggtgcttctccagccttaaccactacgggtattagttaaacagtacgatgggtaatacgacagtgctgataccgttaaaccattctatatctggtcgaggagacctttacaggatgaatctttcgagattttgactgtgacgtaagtcaaaaaacaa

SEQ ID NO: 1052 - DNA, 1602 bp, Brachybacterium phenoliresistens
gtgcttcctcagcggcctgctctggaatcgacgtcagcagacaaccccggggcagggacgaaacggggcgtcgagcctgggaccatccaggacacgggtgtgcaccgtgggcgaggggagaccgcggctccgtccgcggcgtcaccggggaagggctcgttcccgcccccggacggcgggagtgatcccgtcacccacgagcaaccggcatccgagggtgggacctcggatgcgcctcgccgcgccgaggcacgggtgctcgtcctggatcggcgcgggaagccgctcatgcccacgactccgcgtcgtgcgcgtcagctgcttcgttccggccgcgcccgagtgcatcgggtgcagcccttcgtcctccggatcgtcgaccgcagggtcgaggactcggagacagagcccctcgtcctgggcatcgacccgggattccgacataccggcgtcgccctggcgcgcgagcaggaggtccccgacccccgcagcggccgggcgacgacgatccgacacggcctcttcctcctgcgggtggaccatcgcggcgccgtgatccgcgaccgcctctcggcacgctccgccctgcgccgcggccggcgctcgcgcaagctccgctaccgggcgccgcgcttcgacaaccgcgcccgtgccgcgggctggctcgccccgtcgatccgccatcgggcggagaccaccgtgacctgggcgcgccgcctggccgcctgggcccccgtgacgcggatcgacctcgaggtcccgcgcttcgacgcccgtgccctgcaccgggccgacgccgccgtgggcgaccgcggccagggcaccctgcacggcaccgaggtgcgcgaatacgtcctggagcgcgacggccggacctgcgtgtactgcggtgcgagcggcctgggcgccgcctccgtcccgctcacgctggaccatgtgcgtgcccgggcgcacggcgggccggacgcgccggcgaacctcgtcgccgcctgcgtcccctgcaaccgcgacaagggcgaccgcgaggtggaggagtacctcgcccgccggcccgccgtgctcgcccgggtgcgccgcagcctcgcctccgtggtgcagcaggacctctcggtgtccgtctcccgcagcgccctctgccgcgcgctgcagtccgtcggccccgaggtgcgcacccactcgggagggcgcaccaagtggaaccgctcccgggccggcctgccctgggaccacgtgaccgatgcgctgtgcgtgggccgcgtcgacgcgatcgcgtccctgccggcgctgcagcatgtcgccgtctccatggggcgcggctcctattcccgcacccgcatggaccggtacggcttcccccggctccgcctgacccggcgcaagatgcaccacgggctgatcaccggcgacctggtgcgcgccgtggtccccagcggcaggagagcggggacccacgtgggccgcgtcgccgttcgggcgagcggctcctgcaacatcaccaccgcccgcagcaccgtccagcacatcgggcaccgccacatcaccgtcctccagcgcggggacgggtaccggcatctccgcgcgccggtggcgctggccgcctga

SEQ ID NO: 1053 - DNA, 309 bp, Brachybacterium phenoliresistens
gtcaggcgccccaccacagacatcgacgggccccagggcacatcggtggatgtcgagtctgaccagctcgagacaccgctcagagggaggtgactacgttgcacacacgcgagaagacccaccaggccgtgcttcctcagcggcctgctctggaatcgacgtcagcagacaaccccggggcagggacgaaacggggcgtcgagcctgggaccatccaggacacgggtgtgcaccgtgggcgaggggagaccgcggctccgtccgcggcgtcaccggggaagggctcgttcccgcccccggacggcggga

SEQ ID NO: 1054 - DNA, 1305 bp, Unknown
  Ga0116183_1003561 JGI
atgcagcatgtgttggtagtggatacagatagaaggccatgcaacccagtagcacccgggagagcaaggatacttctatccagaggcaaggctgcggttcttaggcgctatcctttcacgattgtgttgaaggggagatcggcaggtgaaacccagcctcttcgtcttaaaatcgatcccggttctaagcagacagggttcgcgctggtgaatgaaatcacaaggaaggttgtgtttgctatggtgcttacgcaccgcggccagcagatcaggaatggtttgctgtctcgaaaaggaatcaggagaaacagaaggaatcgcaaaaccagatacagaaagccccgtttcctgaataggatgaggaagaaaggttggcttccgccgtctctgcagcatcgggtcgataccgtgacaacttgggtgagcaggctgcagaggtttgcgccggtctcagccttatccacacaacttgtgaagttcgacttgcagaagatggagaatcccgaaatatccggtgtcgagtatcagcagggaacgttgcagggctacgaggttagggaatatctactggaaaagtggggacgtaaatgcgcctactgtggagcagagaacgtacccctgcaagtagagcacatccacccgaaggcaaagggtgggagcaacagggtatccaacctgacgctgtcctgcgaggtgtgtaatacagaaaaaggaacgcagcctattgaaatattcctgaagggcaggcctctgaccttaaagcgtatcctagctcaggccaaggcaccgttaaaagacgcggcggcggttaatgcaaccaggtgggctctgtacgaaaggctgaaagatacagaacttccagttgaagcaggaagcggcggccttaccaagttcaacaggacaaggcaaggctacgggaaaggccactggatcgatgctgcgtgtgtcggggtgtcaggagaatcggttgccatcccggtagggatgcaacccttaacagttaaggcaacaggccacggcagccgcctgatgaccagggtggacaagtacggtttccccaggcaggtatcaaagaaaggtggtgccgtcttcgggttccaaaccggagatatcgttaaagcggctgtgccatcagggaaatacgagggcactcataccggcagggtagccgtaagggcaagaggctctttcgtgattgcaacctccgccgggaaaattgaaaccggctacaaaaactgtagcctactacaccgaaaggacgggtacaactacggggcgcattccccgtccaaccaagtcctgtga

SEQ ID NO: 1055 - DNA, 279 bp, Unknown
  Ga0116183_1003561 JGI
gtcaattaccccacccaagcctaacggctatggatgaggcttgcgggaaaccgtaggcctggttgaccagcctaagttcttcgaaaactacgttattgcggttatgacaccctgggatgcgtgccagttccaggctctgtcggcatgagttaaacagttctttagggtacggaacagtgcttatgccatgacaagccacaataaccttggcgaggcaaacattacccccgaaaggggaggctcgtaagagcagaaaggtttcatgtcttaatgcagcat

SEQ ID NO: 1056 - DNA, 684 bp, Pseudothermotoga lettingae TMO
atggtatatgttatttcgaaggatagtaaaccattaatgccaacaaaaagacatggcaaagtaagaagactactaaaacaaggtcttgcaaaagttgttagaagagaaccatttacaattcagttgctgtatgacacaacgacctatacgcaacctattacagttggggtagacattggctcaaaagtaatcggtgtttcagccataacagacaaacaagaattatttagtgcagaagtagaactgcgacaagatataaagaaactgcttttagagagaagagagtatagaagaaacagaagatatggaaaaacaagatatagaaaaccaaaagatgcaaatcatgtttcgacaataggatggcacatagtaaacaggttgaaacaacaatacgatgttgaaataacttttggcagtatcacaaaagcaaaaagaacagaaatggggttagagaaaacacatagaaacgatgcatttgtaatagcaggtggtagcaaagatgttaacagagctactgaatggtactttgggaaatatttcagaagacaaaacacgtcattacacaaagctaatctaatcaagggtggaattaggcaatcgaatactgtaaaggaagttaaagggtttaaaagattcgacagagtaagatataacgatcaaataggcatgcgctggatactttga

SEQ ID NO: 1057 - DNA, 233 bp, Pseudothermotoga lettingae TMO
gtcaactacccgccgcctatagaggcgggggcttgaaaaagccctgattgactaccctcagccacataagtggctacgttagacaggtacaccctatgatgctgctcaagttccaggctctgtcgtacaggtctaaacagtcctgagaggtagggacagtgatctgcacataacaagcctgtctaacattgaggatgagcacctaactccgaaaaggaggcttaccgcatatg

SEQ ID NO: 1058 - DNA, 1386 bp, Unknown
  GENOME_ACESSION: mgm4547164.3 MG-RAST
atgcttacctacgtactatcggcagacggctcacccctgatgccgacatacaacatccgtaaggtgagacacatgcttaaagacggccgtgccgtcattgtcggtcataagccgggattcacgatccggctgacctatccgcttccacagcaggaaggaccgtgcgtacagccggtagagatctgcgaggacgcgggatatcagcacatcggagtctcggttaagtccgagaagcacgagttcgcccatgagcagtacgatctgctcttggacgaaaagcagcgtcatgacgatcagcggagataccgccggatgagaagaaaccggctccgctatcgcaagccccggttcgataatcggcagaaggacgatcaatggctcgcgccgtcgctggagaacaagaaacagcgccatgccgatatcgtccggatgtatgcgaaagtcctgcctcttacgagcgctacggtcgaaatcgcgacattcgacacgcaggcactggaagccaaagcgtccggaaaggaagcaccggaaggaaaggattatcagcatgggccacgctatcagatcgcgacgaagaggaaagcggtctttcagcgggacggttatacctgccaggtatgcggaaggaactctttcaaagacggagcgatcctgagggtccaccacatcggatactgggaaaaagaccattccgaccgtatgagcaatatgatcaccgtatgcacccattgccatacgccggccaaccacaagctgggagggaagctctacggctgggaaccgaagatcagaccgatgggcggagcggcctttatgaatgccgtccgctggcagatcgtcgaaaagattcgcacggactttccggacctggacgtccatacgacctatggggcgtggacggaacttgccagacgacagcggtgcaccggaaagacacacgccaacgacgcctattgtatggggttcttccgtccgaaacatcgggcgaaggaagttctgtataagaaactgcgccgtgcgacacgcgtccttgagaaattctacgatgccaagtacatcgatcttcgagacggcgcgaaaaaaagcggccaggagctctcctgcgggaggacgaaccggccggaaagccgtcattcgaagaaagatcagcggatgcaccggggtcagaaagtgtccaaaggccgacgttcgatccgccggcagcattacgccatccagccgggatgcgtcgtccggtaccggaaacagaagtgcgtgacaaccggaatacacaactatgggacgaggctcctgatcggcggaagttctgtcgccgttaagaatatacagctcctgcgatatgcgggggcatggaccttaagcaaaagaaaggaggtccgcgcataa

SEQ ID NO: 1059 - DNA, 386 bp, Unknown
  GENOME_ACESSION: mgm4547164.3 MG-RAST
gtcaataacccacgactgaagtcgcgggcttgctaagagcaagctccggcagcagtcgagcccttcggggcattattgattagccccagtaccggcagcaatgccggcactacgttacccgcgaatatacaggcaccggcggatgcttcacaagtccaccgctctgcggtccgccattaaacatccctgatgggaaggggaagtgtggcgggcaaaaaaccgcgggataacatcggcgatgtgaacacaccgaaagcggtatcttcggatgccgtaagtaagcaggatccatatcaggaccggcctccacgagcggataccggtatgggagccgtaaggcaaaacatttcgttaaccatttcaggaaggaagcatcaggtatgctt

SEQ ID NO: 1060 - DNA, 1374 bp, Unknown
  Ga0247841_10015468 JGI
atgcagcagttacaagcaaagttaaagaacacacctacggatgcttcccaagtctgtagctctgtaagttccgcattaaacaaggaagaaattcctagtgtacgggacacagtactgacttgtaataacctcgaagggaatctacttcaacatacaggagggcagaaccacaaagtctctgctgttgtgtatgtgttgggcataaatggctctccaattatgccaactagtcctatgagagccagaaaactgttgaagtctggtaaagcaatggtagtaaagcaattcccatttaccatacaatcaatagttcctataggcaataataagcaagaaatagtattggggattgatagtggttataagaatattggttattcttgtaaaacttctaaaaaagaattgtttagtggcatagttgttctggaaaacaaaacgaaggaaaggttatctgaaagaagaatgtatcgcagttataaaaggggcaaattgtggtatagaaagccaagatttaacaatagaaagaaaagtagtacttggcttcctccctccattgaacgcaactatgatgttcatctgttaatgtttgacaagattaagaagtttttaccaatagccaaaactattgttgaaaacggcaattttgacatacaaaagattattaatccagaaattaaaggcaaggaatatcaacaaggcaatatgtatggttttgaaaatttaaaagcgtttgtaatctctagagagaaaggcgagtgtcaattctgtggtaaagaaaaaggcaatgatgtttggcgtttccaccatattaatggccgaatgactagttctaattctgcttacaatttggctttgttacattctaagtgccacgacaagatacataaaaagaatttagagaagtcaatcaatagtaacagggaatataaagaaattacttttatgaatataattaaggatagattccagaaagatttagattgtcaaactacttacggatatattacttacgcaaaaagaatggaattgaaacttcccaaaactcacattaacgatgcttttgtaattgctggtggaactaaccaaattaggtgcttgcccatgacggtaattcagaaaagaaaaaacaacagaactctacaatgcaatcgcaatggttttgccccttccattagaaaacaaagatatatctatcagcccaaagatttagtaacgataaataataaaaaatatagcattgttggcactagaaattatggcgaatatgtttatgtaaagaataaaaatgctattaaaccattgaatttttctgtaaaaaagatacaaaaacattttatgaacaatagtttaatatttcaaggaagcaagagttaa

SEQ ID NO: 1061 - DNA, 289 bp, Unknown
  Ga0247841_10015468 JGI
gtcaattgcttctgcctaaaagcaggagtttgcgcagtaatgcacaacgagtaaatatgtaaaagtatttgcaagagttgattagagggcaggagaaagcaagatgcagcagttacaagcaaagttaaagaacacacctacggatgcttcccaagtctgtagctctgtaagttccgcattaaacaaggaagaaattcctagtgtacgggacacagtactgacttgtaataacctcgaagggaatctacttcaacatacaggagggcagaaccacaaagtctctgctgtt

SEQ ID NO: 1062 - DNA, 807 bp, Unknown
  Ga0070741_10034480 JGI
atgccttgcacccctccgaaggcaagggtcttgctcaaagagggaaaagcgaaaccacggagtcgatgggaggccaaagcaaggattgtggctcatctggggaagaccttgcccatcaccgatgtcgtggtggaagatgtagctgccgtgacaaggaaagggaaaggtggcaagtggaatggatcgtttagtcccgttcaagtcggcaaggaccatctctatgggatgctgcaagagatggggttggtgcttcacttgaggtcagggtggcaaacaaaggagttaagagacctgtatggtttgaagaaaacgaaaagcaaatcgaagcaatcttttgactctcatgccgtagacgcctgggtgctagcagcagccatcacgggtgccaaagagccaacctgtaggcagttgtggtatgtcgtcccagctatcctccacaggcgacaattgcaccgactgcaagccgcaaaaggcggagagcgcaagccctatggggggacgcgttcgcttgggtacaagcgtggaaccctggtcagacacaagaaatacggcctctgtaccgttggcggctttgaccgcaagcgtgcaacggtgagcctgcatgactatcaaacgaacaaaaggctgacgcagggagcaaaagtggaggggtgccaaaccttaacgtggatggcattccgttcctggttggtcagagagccacatcagaagacaggcaagggaaccgcccatcccaagccgctgcgatcaggaagacctgcttcatccccacatctctgcgaaaggggtctccgcaggtcgagttga

SEQ ID NO: 1063 - DNA, 247 bp, Unknown
  Ga0070741_10034480 JGI
gtcaggaaccccacggcgaaagccgggggcttgcgaaagggctagcgcaacgtaagtttctgtctagtgggtcttcctctgaagacaggcagcattgtagagctacaagaacgtccagataccaccctagtctggaccgcttctcaccacgcccaagtggatgctacggatacaatcgtagctaagcccacagtgccaccacgaagggtcattgtaccctggctttgaccaggcgaaaggaaatcct

SEQ ID NO: 1064 - DNA, 1044 bp, Unknown
  Ga0163155_10003458 JGI
atgtttgttccagtagtagattctttaaataaaccattgatgccaaccacgtgttcaagggcggctagatggattaaattcaaaaaagcaactggtttttggaaacgtggaatctattgtgtaagactaaatgttgaaccctcagatagaaagtttcaagaaattgcagtaggaatagacccaggttcaaagagagagggtttcactgtaaaatcagaatctcatacttttgctaatatacaaacccatgcaattggttgggtaaagagagcaatggaaacaagaaagatactgagaaggacaagacgttcaagaaatacgccctatagaaaatgtagatggaatagagcaataggtggtttagttccaagcacaaaatcaagatggcaattgaagttaagaatttgcaaatggttattgaaattattcccaattacacatttcaattgtgaagatattaaagcagtgagtaaagaaggacaaagaaagtggaatgtgtcttttagccctattgaagttggtaagcagtggttttattctgaacttagaaaactaggaactctaaaagagacacctggattttcaacttatattgatagaaatgccctaggtttaaataagacaagaaagaaactaagcagtggatttgatgctcattgtgtagacagttgggttcttgcaaatcaaatagtgggtggacatacaaaaccagataatacaaaagttctagaaataattccattgcaatttcataacagacaattgcatgttcagaatttttctaaaggtggagttagaaaaagttttggcggttctatgagtgaaggttttaaaagaggaagtttagtaaaacacatcaagcatggactatgtttgattggtggtgcatcaaagggcttcataagtctacacaataaaaacagtaacaaaagaatatgtcagaatgcaaagaaacaagatattaacttcttatcctataacacttggagggtgacaattcctcccacagataaatcagtgggtttccttgtcacgattgcatga

SEQ ID NO: 1065 - DNA, 190 bp, Unknown
  Ga0163155_10003458 JGI
gtcaataacccacgaataaatatcgtgggcttgtgaaaggtagccaactatcaaacacaagattaaaaactattgactagacattaataattaggtttctgaacgtggtagttcaaaagatattgaggatgcttcactagtcttctttccctctgaaatccaatgtcgaagtgatgtagaaaaagagtta

SEQ ID NO: 1066 - DNA, 1287 bp, Unknown
  Ga0315289_10016130 JGI
atggtagtttttgtaattaacaagcatggggaggcattgatgccttgcagtacaagaaaagcaagattgcttcttaaagaagaaaaagcaaaaattgtaaattataaaccatttacaattcagttgctttatggttcttctgggtataagcaagaaaccaaattaggtatagatataggggcaaaacatgttggagttgctataacttctggaaacactgtgttagtaaaagggcagattgatcttagacaagatgtttcaaaattattagaaacaagaaaaatattaagaaaatcaagaagaaatagaacaactcgttatagacaagcaagatttcttaatagggttgcttctaaaaaagagaactggttacctccctcaattcaaagtagaataaataatacagtgatgtggataaataaattttataatttattacctaagtgcaaattaagtattgaagtagctaaatttgatattcaaaaaattgagaatccggaaatttctggaaaagaatatcaacagggaactttatatgaatatagaaatagaattgcttatttaatagctagagaaaaaggaaaatgtcaattttgtaataaagaatatcaaaaaaataatggctggagattacatcatattttcggtaagaaaaaagatagaccggcagattgggcattattgcatttgcaatgtcataatgaattacatgctaaaaaactagaacatattttgcaaaaacaaaaatctaaatcttataaagaagctacttttatgaatattataagaaaagggttgtttagtatttttcctgaagcaaatttcacgtatggaaatataacttttcaagatagatgtcaattagatttaggaaagtcacatgttaatgatgccgtagcaattacaggaataaaaaatataaataaaaattctgattctatattttttataaatcaatttagaaaaaagaaaaggagtttacatgaagcaacagcaagaaaaagaaaaaatggtaatatattatcaataagaaattcaaaaaatactaaatctttaaatgggtttaatttaaatgatcaagtaaaagtttttaataaaattggatttatttctggattcacatctggtgcttgctatataaaagatatttttggaaaatatataatattaccagaaaaatcgtataaacaagtatcatttttaaatataagaaaaataagttataataataactggcaattcatcccccacctgaaggaaggggatttcttgccagaaataggttaa

SEQ ID NO: 1067 - DNA, 242 bp, Unknown
  Ga0315289_10016130 JGI
gtcaattacccctccctaaagggaggggcttgaacggtaacgtttgagagtaattagttgactacactaaggtctttgagacctacgttatttagatgatgatacctacagatgatacccaagtctgtggctctatcgaggcgctgtaaacaaagaggaaactcttagtcaacctcatttagtaaagtctttataactttgtggatgggtaacaaatccgaaaggaggaaaacttaatggta

SEQ ID NO: 1068 - DNA, 1029 bp, Human oral metagenome
atgtatgtcgtctatgtattaaatcgtcaaggcaagccgctcatgccaaccaaacgatttggacatgtgcggcgtatgctaaaaactggcaaagcaaaagccatttcgacaaagcctttcgtcattcagttgcagtacgagtccacggattttgttcagcctctttatggaggaacagatcctggacgcaccaatattggcgaggctgtgttaaacaacaaaggcgaggtcgtgtacgcggctcatgtcataacacgcaataaggaaataccaaaactaatggcggatcgtgccacacatcgtagggcttctcgccgtggggaacgtctacgccgtaaacgtcgcgcaaaagccaatggtacaatgacatgcttcccagaaggacggaagctatcaggatataaagatggggttcttgaattaaaaggcatcatcaacacggagagtcgcttcaacaatcgaaaacgccctgccggatggctgacacctaccgcaaggcaatgtattcagacgcacttaaacatggtgcagaacatctgcaagattcttcctgtcacagattggacactagagtacaaccgcttcgcgttcatgcaactagaggatggttctgttcgtggatggggtttccagaacggcaggctcaaaggctacgccaataaagaagactatatctatgccttgcaaggcggcgtttgcatttgttgcggtgctcctattgaacattatcaccatatcaaaccacggcacaaaggaggttctaatactcctgaaaatcttgttggactttgctccgtttgccatgcagagatacatacaggcaaacggaatttagacaaaattggcaaatacaaaaagtatgccggaacttctatcgttaatatcgctattccattcatttgggatggcatagtgaagatgttcgggaacaaggctcatatttgtgaagggcaagagactgccgaacttcggagggcgaacaatatttcaaaggaacactttacagatgcagtctgtattgcaggtatt

SEQ ID NO: 1069 - DNA, 230 bp, Human oral metagenome
gtcaataacccaccgcccatcaccaaatggtgattaaggcgtgggcttgaaaaagcccagcgttattgagcagagacaaataatgacacgacaggattaagttccgaaccaccttgggtgatgccaagcctcttgctctgggcgtagtcgtgccgagtctatggcaacacaacttgatgactttatgtcattaagacttatctctaaaaggagatttttgtatgtatgtc

SEQ ID NO: 1070 - DNA, 1536 bp, Unknown
  Ga0395764_001082 JGI
atgaaagtatttgttatcggtatgaacgacagaccgctcatgccaaccacaccaagaaaggcacggatattacttcgtgataagaaagccacagtagtaaaaaaagtgcctttcacaatcaaactgaattacaaaacgggttctgcaacacaaacgggttatatggggatagatacaggatctcaacatatcggtgtatccgttttacgtgaaaatgctgaaggtaattatactgttttatcgaaaacagagtattcgcttcgcacaaccatgaataaacggaaactgatagaatctcgtaaaacccttcgccgtggtcgaagatttcgcaaaacgccgtatcgacatcctaaatggcattttcatacgaaacgggtttatgttaaaaaagcgataaatcgtaaaaaacatacgacacactggaagaaaaaatctgtgaagtttacatcatccagacaggctggatggttaccgccatcaatccagcaaaaagtggatcacacaattactattattaagacctataaagaaattcttccagacagcattacagcaaatgttaccatagaagttggacggttcgatgtagctcgaatgaaaaatcctgaaatacatggggagatgtatcaacaaggatcgcaatatgaccatgagaatgttcgagcgtatgtattcgagagagatggatataaatgtcagtgttgcaaaaagaaagccgggacaaaaagaaaagatggttctgttgtaaagattattgcacatcatatcgattttgtgtcacaaggtgcaaccgatgatcctgacggaatgattacaatctgcaataaatgtcatacaacaaagaatcataagccgggcggcattctttataaatggatggtagcaggtaagaagatggctcgcagatatcgtgatgccacatttatgaatatactaagaaagcgtttgtttgatgctttcccggattgtcattttacttatggtaattttactaaggtgaatcgggaaaaactgaaactggataaaacacatgcaaacgatgcaaccgcaattgcattgtcatatgttttttatattcttaaagatgcgatatctgtatatgataatgaagaaactgtctatatacagcaggttcgtaaaaagaaacggtcgcttcacgaacagaccccacgtaaaggcaaaaaagacaaaccaaatacaaaacaggtgagaaataacaaaaatacaaagtctgtaactgttaaaatgaaaagaatggttgatggtaaaccagtaagggatgaaaacaaacatatcgtatatgatcataaaacaataagtatttttgataaggtatcatacaataatagagaagggtgggtcacatcattttccgaatcttcatgtcgcatacaggatgtgaatggtgaatacataaaaaaatatgaaaactctgaattgattcctgtgactgaagtgacatttttgcatcataatagtaattggttaataggtcccaaaatggagttgccacgattaaaaacgaataaagtctaa

SEQ ID NO: 1071 - DNA, 303 bp, Unknown
  Ga0395764_001082 JGI
tcggcaattgaattaccgagcatgtgttcgcatatgcaaagtggttctattgttttccttcgggaacaagttgactagccttagtgaagcttactcttcggagtatgtcggaactagattctgattatcaatactctaacttgtagtacccaagcaagggtgggttcaggcaacggatgtttactgggagtaggtaaacaccgacctgatgcaagaagtagtcaggattttggcgatgggtgattacacggcagtgaaggtggctgtatagtccacctaatatgcaaaggagttactatgaaa

SEQ ID NO: 1072 - DNA, 1125 bp, Unknown
  Ga0373632_0063621 JGI
atggcagtttttgttttagatcgtaatggcaaggcattaatgccgtgcaatgagaagcgcgctagcttattgctaacacgcaatcgtgcgcgcgtgcatcgcatcctgccattctcgattcgaatcattgaccgtcaggcgtcttcctgtgagtttcaagcattacgcattaagttagatccaggcagtaaaacgacaggcatggctttagtaagagaatcagataacggcagcattgctgtgctgaatctgttcgagttaattcatcgcggacgtcaaatcagtgaagcattaacagcaagaagcaatatgcgccgccgtcgccgtactgctaatctgcgctatcgcgcaccgcgttttctgaatcgcggaaataagcaatctggctggttagccccaagcctgcagcatagaatcaacaccagtatggcttgggtaaatagattccgtaaattagcgccgatcagcgctatctcgcaagagctggtgaagtttgatatgcagcagatggcgtcaccagaaatctctggcgttgaatatcagcaaggcactttgctaggttacgaggtacgcgagtatttgttagagaaattcaaccgcacctgcgtttactgcgacgctaaagatacacccatgcagattgagcacatccatcctaaagctaatggcggcactaaccgcatcagtaatttggcgttagcttgcggcccctgcaatcagcgcaaagccgcacaggatattaatgtgtttttggcaaaagatccggtgcgtctaaaacgcattttagcgcaagttacaaagcctttgaaagacgcggccgcggtgaatgctactcgatgggctttgttcagcgcattaaaagcgactggattaggtgtggaaatcacatccggcggtaagactaaatacaaccgcagtcgcctgaatattccaaagacgcatgccttggatgcggtctgtgtcggcgctgtagaatcgattgaagattggaataagccgacattgaatatcaaatccatgggccgcggttgctatcaacgcacgcgcctgacggcctttggctttcctcgcggttacttaacgcgcgttaaaaatattcaaggctttcaaacgggcgatatggtc

SEQ ID NO: 1073 - DNA, 342 bp, Unknown
  Ga0373632_0063621 JGI
gtaaaccaccccgaccttaaggtcggagcttttagaggaaaggctaaaagttcaagtttaccagcctaagccgtgtcatttagcggctacgttgtacagatgtaaaagacctacgtcaggatgcttccttagtcctggcctctagaagtagcgacgcagacaagcgacagggtaagtacgaaacggtctgctacaagataagcaattatcgaagctgctgtacaacattggcgaagggagagtgattgaactgtcgtgagacaggttaatcaccgtcacaagacccgtaagggttgacgatctgcaaagacagataattattaaaataggagatttatggca

SEQ ID NO: 1074 - DNA, 1287 bp, Unknown
  Ga0137373_10002777 JGI
atggtctttgtgatctcaagcgacggagcgccgctggacccctgccatgaggccagggccagggagttgctgaagaagggccgcgcggcggtttggcgcacctacccattcacgatccggctgaagaaccgcacggcggctgaaagcgtcacgcacgatcatcggctgaaaatcgatccgggtagcaagaccactggcctcgccgtcgtccaggagaggaccgggcgcgtagtgttcgccgctgaactcagccaccgaggccaggtcatccgcgacgcgctgctggcgcgccgggccctccggcgtagtcgccgcagccgccacacccggtatcggcctgcgcggttcgataatcgccgccgcccggcgggttggcttgcgccgagcctgctgcaccgagtcctgaccacggaaacctggctcaatcgtctgcgacggctctgtccaatcgcggccttgtcagtcgagttggcgcggtttgacactcaactgttggacaacccggagatcagtggagtggagtaccagcagggcactctgctcggttacgaaatccgggcctacttgctggaaaagtggggccgctgctgtgcctactgcggcgtgaccggcgtacccttgcaggtcgagcatatcgtcccgcgcatgcggggcggcagcagccgtgtctcgaacctcaccctggcctgcgcggactgcaaccaagcgaaagggaacaaaacagccgccgagtttggctatccccacatccaggcgcaggccaggcaaccgctcaaggacgccgccgcgatgaacagcgtgcgttgggcgctctatgggcggctgctggcgaccgggctgtcccgcgaagtcggcacgggtggacggacgcgtgccaaccgagcgcggctcaacctgcccaaggcgcattggagtgatgccgcagtggtgggcgtgagcacgccggacaatctgcgtgtggtggccaggtccgtcctgctcatcgccgccaaagggcacggctctcggcagatgtgcgggacgaacgccagcggcttcccgattcgccacaaactagggcagaaacggttcttcgggttccagacaggtgacttggtgcgggcggtcgtgcttactgggaggcgggcgggcactcacgtcgggcgtgtgttgtgtcgcgcctccggttggtttgaccttacaacgaagcaaggtcgccaagcgggcattagccatcggtattgccggatggtgcagcgggccgatggatatgcctatgcaaccagaaaaacgagcgcggcttcctga

SEQ ID NO: 1075 - DNA, 284 bp, Unknown
  Ga0137373_10002777 JGI
ggtgccagggtagtttttctgcagtctctggatgtcgtgggcttgcggggcaaccgcaggcccgtcctgaccatgaccaagtggtagccaacccgctccgtgcgggaggccatgacactccgggctgcgtcgcgccaggcccggactctgtcgcccgtcatcatgagccgtggggtaagcggcgaaggtggtgggtaagacaagcctcctgcacatggtcgcggcgcacatcacccccgcgaggggagaggccccggtaacggggcataggaacgaagcaaatg

SEQ ID NO: 1076 - DNA, 1380 bp, Unknown
  Ga0373625_0005570 JGI
atgaaagtatttgttttaagttcagataaaaaacctcttgatccctgcaatccagcaagagcaagaaaaatgcttaatcaaggtaaagcctctgtgtttaagcaatatccttttactatcattctaaaatcgtgttggtcattcatggtaaaaacaagtgaatatagattaaagattgaccccggtagcaaggttgctggattggcgatagtatcgtcaaaaggtgaagcggtatttgcgtgtgaggtaaagcacagagggtatactatcacagatttgctaaagtcaagacgtggtattaggcggtcaagacgtaatcgcaaaacacgttaccgaaaagctaggttcatgaataggcgcagacagggacaatttagtcccaatatcagtattgatgaagaaaaaaatataaaaggcaagggctggcttccaccaagtttatgcagtagaatgtataatgtggaaacatgggttagacgattaagaaaactctgtcctataaaaacaatatcttatgagctgacaaagtttgatacacagcggatgcagaatccagatatttcaggtgtggaatatcagcaaggtgaacttgcgggatacgatgtaagagagtatttgttagagaaatatgagaggaaatgcgtttattgtggcgcaaaagatgtgcctttggaagtagaacatgtcattccaaaagacaagggtggtagcgatagggtatcgaaccttgtaatctcatgtcgtaagtgtaacatgagaaaggcaaataaaagcattgaggagtttttgaagagcaaaccagaccaattagctaatataaaaatacagttaaaagagccattaaaagatactgcctctatgaacgctacaagatgggcattgtttaacaaattaaaagcattaggattgccgattgagataggaacaggagctactacgaaatataatcgttcaagacttgatttgccaaaggaacactggatagacgccgcttgcgttggattaagcacacccgataatcttgatattagtaatacaaagcctttatgtattaaagctgttggacatggctctcgtcaaatgtgccgtgtttatggtttaagttgtaaaggtcagaagtcggaatctggcaaagtaaagatgcccgggtacccaagatcgaaagctaaatcattaaaatgttatggcgggattcaaactggtgatatagctaaggctgttgtcccttcgggcaaggaaaagggaacacatgtaggcaaagtagccattcggagtactggagatttccatgttattaataagacaggtgatcatgaccatattcatcgtagattttgtgaattgatacaacatgctgatggatattcatataattattaa

SEQ ID NO: 1077 - DNA, 259 bp, Unknown
  Ga0373625_0005570 JGI
gacgacaaaagcttgactcaaacatagccgagaaatcgggatagtaaccagactcagccctgaaccagattcagggctacgttattcatgtcatgataccctgagatgcgctgccagtctcaagctctatcgtatagcattaaacaggacgatggaactaagccagtgattatacatgacaagcatggataacattgtcgaggcaaacattaccccagaaatgggagacgccccttgcggggcattttgaaatatgaaa

SEQ ID NO: 1078 - DNA, 918 bp, Unknown
  GENOME_ACESSION: mgm4784118.3 MG-RAST
atgtgcaaagttctattaattgacaccgaaaaaagaccgttaagcccaatttatccagcccaagcgaggcaattgttaagaaacaaaaaggcagcagtttttaggcgtttcccgttcactttgattctcaaagaatcacgtcctgattccccgatctcacctttaagattaaaaattgaccctggtgcaaaatttacgggaattgcactggtcaacgattcaacaggagaggtcgtatttgcagccgaattaaagcatagaggtttggcaattcgagattctttaacgtcaagaaggcaacttcgcagaagtagaagaaatcgtaaaacacgttatcgcccaccaagattcttaaacagaactagaccgttaggatggctagcgccaagtctacaaagtcggattgggaatattaaagcttgggtcgagaaactacgcaaattcgcaccaattgcagcaattagccaggaattagtacgcttcgatctgcaactaatgcgcaatccagatcttcaaggtaaggaataccaacaaggtacacttgcgggttatgaaactagagaatacttgctcgaaaaatggaatagacaatgcgcttattgtggcgtaaaggatgttccacttcagatagaacatatttacccccgagcaaaaggaggctctaactcaattacaaatctgactttaagttgcgaaaaatgtaacaaaaagaaaggaactaaggctcttaaagaattcctcaaaaaagaccagtcaaggttagaaaaaatcttgaaacaagcaaaaagaccattggcagatgcagcagcagttaatgcaactagatttgcacagatattgttcaattattcacaaaaaggatggttattcctatgcgtcatagctcctgccccccgtttcctctcaccgccaaactga

SEQ ID NO: 1079 - DNA, 260 bp, Unknown
  GENOME_ACESSION: mgm4784118.3 MG-RAST
gtaaacaacccaccaccaattgctaagagcaatatggtgggggcttttaaagaagctctagtttaccagtctaagtgttaaatcactacgtttaaggcaagtgttaaagacctaccaggggatgcgaagctagtcccttgctctagaacccaacgattaaacaggcttaaagggttaaaccagtgtcgtgcgtggatagttaccgaccttaaacattgacgaagctaacattacccgaaaggaggcactttatgtgcaaa

SEQ ID NO: 1080 - DNA, 1098 bp, Gloeocapsa sp. PCC 73106
atgccaagagtacctgtaatttcaaaagacaacatccctctaatgccgaccaaaccaagtcgcgctagaaaatggattaaagaaggaaaagccctagggcaattcaacgacctcggtattttctatatccagttaaccgaatccccatctagcaatcaaactcaacctatttctgtaggaattgaccccggtaaattgttttcaggaataggtgttcaatcccccctctataccctttggacagctcatctagagttacccttcaaacgagttagaaaaaggatggagaagcgtcgtataatgcgacgagcaagacggggaagacggattaaccgtaagcaaacctttgaactgagagcgcatcgccaaaagcggttctctaatcgaaaacaatcgaagttaccgccaagtattaaagcaaaccgtcaactagaaattagagtagtttctgaactatctaaaatctatccaattactggtatatactttgaatacgtgaaagccgacgtagatttaacgtctggtagaaaaggagctaaatcagggaaagggttttcagctgtaatggtaggacaaaactgggcgatcgaacaattgtctaaaactgctcctgttcatacacgctttggttgggagacatctaatcttagaaaacatttagggttagaaaagtcaacaaataaagccaagcaaagtccagagagtcatgcgaacgatggtatcgctttagcttgtttccattttttacagtacttaccttttcatactactacctcccatggacatctatggaaaggaaaagttaacttaacaacagcaatctttgctgtaattaaaagacctccagtcagtcgtcgtcaacttcatctaatggttccagtcaaagggggagtaaggcgaaaatatggaggaacaactacaaaattcggtttaagaaaaggtgacttagtctttaccccaaaagggattggctttgtcagtggacagaccgaaaaacaaatatctgtcagcgatgctaactggaaaaggttagggcagataagctctcttaaagtaaaattaatccgacgttctacgggtttaattgttagttgctag

SEQ ID NO: 1081 - DNA, 228 bp, Gloeocapsa sp. PCC 73106
ttcaccaaccctgacctaaaggtacagggattgaccaaaccaatgtggttgacttaagcggtgaatagcccacagagcctaactatctcacagacctccgaatacttctctagttcggattcaatctaaacccgattggtacgggtgctcttaaagacaggacatggttagttaggtgggcgaagggacacaaactctctctcttgaggattatctcccatgccaaga

SEQ ID NO: 1082 - DNA, 732 bp, Human gut metagenome
atggtgtatgtactgaacaggatcggccagcccctgatgccctgtaaggaggcaaaggccagaaagttattaaaaaatcataaagcaagagtagataaaagagagccgtttacgattcaattactgtttgactgcgaaaaccggatacaggatattacgcttggcatcgatgccggaagtaaacatctgggactgtcggcaacaacagaacaaaaggaattgtatgccgcagatgtggagctgcgaagtgatattgtggaactgttatcaacccgcaggcaatacaggagaacacgcagaggcagattaagatatcgtgctccgagattttgtaaccgggttcgttctagaaacaaaggctggcttgctccgtccgtcgaacagaaaattaagactcatttacgggtggtcaacgatgtatgcaggattcttccggtttcgaaaatcattgtggaaacagctgctttcgatgtacagaaaatagagaatccggatataagcggagaaggataccagcagggaagccaattggatttttggaatgtcagggagtatgtattatggagagataaccatgaatgccaatgctgccatgggaaatcaatggataaaatattaaatgtacatcatatagagagccggaaaaccggcggtgattcaccgaagaatctgattactttgtgtaaaaattgccatgatcaatatcatatgggaaaaataatccgaacttga

SEQ ID NO: 1083 - DNA, 245 bp, Human gut metagenome
ggcgtgtcaataacccaccacgaaagcagtgagcttatataagcttttattgactagacccggtgtataaagcactccgttatgtaagaatatatagttaccagtggacgtacagcctaatccactgctctaagaatggtgattaaacagttctgacgggaaggaacagtgttgctgttagaaaaccttatataacatcgtctaaggctgcatgacttcggcatacaggaggatttaaaatcatg

SEQ ID NO: 1084 - DNA, 900 bp, Unknown
  Ga0307928_10009122 JGI
atggtaaaacaacaacagaagttattcaagagagatacatgcatacctagagatacttctctagtctctggctctatgattagtaatgtaaacaaagaggaaactcttagtcatactaattcaaaaaccttagataacaatctcgaagagaaccaacaccaacaaacaggtgggtttaagaccaaagtgtttgtaatagcaaagagtggaaaagttttgatgccaactactccaagaaaagcaaggcatcttttgaaacaacagaaagcaaaagtagtaacgacaaaaccatttgcaatcaaacttaattgggattgtgaagaaatagtgcaagaagtcaatttaggaattgatactggagtaaaaacaattggttattcagtaacatcaaaaactaaagaattgatttctggagaatttgtgttaagaacaaatattagtaaaaaaattagcgatagagcaatgtatcgaagaaataaaagaaataaactttggtacagagaagcaagattcttgaatagaactaaatcaaaacccaaaggttggttagcaccatcagttcagcataaaattgattcgcatatcagattgattaataaaataaaatctttgattccaataactaaagtaattattgaatcaagtcaatttgatgctcaaaagttacagaatccagatattgaaggaagtgaatatcaaaatggtcaaatgaaagatttcgagaatgtaaagatgtttgttagacaaagagataaatacacttgtcaaatctgtaagaaaaaagatgataaaatgttagatgttcaccacataattcagaggaaagatggtggaagcgatagaccagataatctgataacattacatcaatcatgtcataagaaattccatttgggtaag

SEQ ID NO: 1085 - DNA, 264 bp, Unknown; identical to SEQ ID NO: 745
  Ga0307928_10009122 JGI

SEQ ID NO: 1086 - DNA, 612 bp, Unknown
  Ga0126373_10059781 | JGI
atgccctgccagcctcgcaaggcacgccttctgctcaaagcaggcaaggccaaagtgaaaagcatggtgccttttaccatccaactgctctatgggagtagcggctacacgcaagaggtctccttgggcatcgatgctggcacacagcatatcggcgtctctgcgacaacagagcaggccgtcttgttcgaggctgaggtctccccccgtacagatgtgactgaactgctggcaacgcgccggcaatttcgccgggccaggcgtcaccgcaagaccagataccgcaaagcgcgcttccccaatgtgcatctgacctatggatacctaactaagtctacccgcatcgctcaccaattggagaagtcccacatcatggatgctcgctgtatcagtggtaacccgtgtgcgcagagtgagggagcttcctacctcatgaggtgggtccgacgcaataaccgccaactccacaaggcgactatcaggaagaaaggacagcgacaaaaaaacactgcatccaaatacgtccagggctctcgcctcttcgactgcgtgcgctatcaggggaagccttgctttgtattcggcagacgcagtagtggctattttgatctt

SEQ ID NO: 1087 - DNA, 241 bp, Unknown
  Ga0126373_10059781 | JGI
gtcaaggacccgttcccctcaaggggatgggcttgcgtgagcaagccttgtttgactagccttcgtctcgtcgaagactccgttggatgcgtcaggatacctacgggtgcctactctagcctgtagctctatcgctggtgattaacagttctgatgggcaggaacggtgttgccagcagaacaagcgcactcaacattggcgaagagtaccagactccgaaaggaggtagacgttgtgttc

SEQ ID NO: 1088 - DNA, 687 bp, Unknown
  Ga0120401_1040793 JGI
atgaatggtttcgatacgcaagctactcaacccaaggtttatgtcagaaacaaaaatggtaatcctttaatgccatgcaaacccgcaaaagcaagaaaactattgcgagacggtaaagccaaggtagtgtctcggtctccttttactatccaactcctctgggattgtgaggactcagttcaatctgttaccttaggtattgacaaggggagtcacataacaggctttagttgtgttggaaacgaacagattttaatgtcaggccaaatccatcaccggacggacatcaaaggaaaaatggacgctcgaatttggacgactaaaggtggaaaagatagcatctacaatttgataactctttgtgagatttgtcatgacagagtacatcaaaaaggcgaaagtggcaaagttaagatcaaaggcggtaaggtagtaacaggtatggatggattttctgataggattgctcaaaggacaatgaaaagccgcttcgcctctccgcttcgctccgagcaaggtaaaactttaatgtaccaaaagttagaaaaaatagcctccttatcaactgtgtatggttatcagacttcagcttaccgtaagtcactttctttgcccaagacgcatgacattgatgcgatgttaattgccactctttatactggtgaagtgattaggtaccatcgtgac

SEQ ID NO: 1089 - DNA, 346 bp, Unknown
  Ga0120401_1040793 JGI
tcggtagtttacataaaaccgtaaactacaaaagccgacatggagctaacagtgggcatccagagactctatctggatgcagaagttagatagtcaccgcaaagcggggacctctacgggatatcacaccgacagatgttgttccagttttcgtcttgaaagggtgtacaccgtctttcaagacaaattggtcgctctgtgggaccgtattaagggtagccgaaaggtgaaggtgtgcggtctgtaaaaaaccgatctaacagccacgaggagcaaaaaactctcacattcaggaggtcataggtacgttatgaatggtttcgatacgcaagctactcaacccaag

SEQ ID NO: 1090 - DNA, 1473 bp, Unknown
  Ga0101770_1001685 JGI
gtggcagttttcgtgttagacagacacaaaaaaccgttaatgccatgtaccgagaagcgggcaagaaagatgcttgaagccggtcgtgccgtgatacacagaatgtatccgttcacaataaggctaaaagatcgaaccgttgaggaaagctctttgcaaccgttgaggctgaagatcgatcccgggtcaaaagataccggactagccgttatacgtgagaagagccaagaagagggagctgtaatatggctatgcaaccttcatcataaagcaggcattaaagacaagctcgattctcgcagagccatcaggcgaagcagaagaaacagaaagacaagatacagagccccacggttcttaaacaggcataacgagaagtgcagagcttgcggcagaaacgcccaacatggaaaacactactgcaggcaatgcaatgaggctaagaactttgtagataatgggcataggaatatttggttgccgccttcgctaaatgctcgtgttatgcaaacgataaatacagtaaacaagctcagaaagtttatgccaataagggcaatatctatggagcttgtgagattcgatattcagcaaatggagaatcctgatatatcgggagttgagtatcagcaaggtgatttgttaggctatgaggttaaagaatatctgcttactaaacacaattattcctgcgcttactgtggggccagagacgatattcttgaggttgagcacgtagtgcctagaaaacccaaagcagggccaaagggcaccaacaggcttggcaatcttgtcatagcttgcagggagtgtaacatggccaaaggtaatctacaaccgcaggagtggcttgaaatattgaagaagtcgagtagcaagaaagatcagactagagctaagaatttagctaacatcctgaaagtggtaaaacgaccactccccgatcctgccatgatgaatgccacacgatggaaacttttcgagttattgaagagcactggtctcccattagaatgcggttcaggtggaaggacgaagaaacaaaggatagatcatggcctaccgaaggcatcatcagacaagaaagaggtctatcactactacgatgcttgctgtgtggggacaagcacaccggacagactggactttaagacaagttacgctgagatgtggtccgcaattggtagaggaacaaggcagatgtgtttccctgacaaatatgggtttccgagcaagcatcggcagaggcacaagcaatactttggtttccagactggtgacattgtaagagctatgaaacctaaaggcaaggatgcaggagagcatatgggtagagttacagttagagtatctggtagtttcgacataagaaaccacaagggggagattgtttgccatagcgtaaattataagtactgcaagttgattatgaagggcgatgggtacggatacggcaaaactttaaggggataa

SEQ ID NO: 1091 - DNA, 288 bp, Unknown
  Ga0101770_1001685 JGI
ttcaactaaccttttaaccactaacgcgcaaaagttgtaggccaactaggcccgaaagggcaggcgaaaccagcctaaacccgaaacttagggctacgttatcctggtcatgacaccttggaatgcttctccagttccaagctctgtcgctcaacgttaaacagatgattgtagcgaagtcagtgcgttgagcgtaaaaagccaggataacattggcgaggagagactcacgaaagtgagcgttacaagtcccgtaagggaatttttaaggagcgtgttaaagtggca

SEQ ID NO: 1092 - DNA, 1347 bp, Unknown
  Ga0114977_10001865 JGI
atgaacagagtttttgttttagatacaaataaacaaccactagctccttgcactccagcacgggctagacagttgttagataacaataaggctgccgcctatcgatataatccattcacgattatattgcatagagaagtagaattagatgtacaagatatctattctatcaatttagacccaggtgcagtgactaccggattagctattatcggccatttccctaaacaaggtgatgttgtgatttttggtgcagaaattacccataaatctaaagctattaaagctaaattatatgcccgtagcggttttcgcgccggaagacgtagccgattacgttatagaaaaccaagatttgataacagaaccagaccagaaggatggttgccaccatctcttgaatcacgggttaattgcattacccattttgttaataaatttaaacagttattatctaatgctaatatgtgcaatattgaattgcccaaattcgatacacaaaaaatgaataatcccaatatcaaaaattatcaataccaacaaggtgttatgaaagattttgataatacaaaagattatttaatccatagagatggcgaatcttgtttctattgtggtgctactgatactaaattatttaaagaacatgttgcgcctcgcgcaattggtggtaattcggttaataatctggttttatcatgcatagcttgcaataccaaaaaatctaataaaccagttgatgaattcttatcagataaaccagaagttttagataaattgaaaaataagaatgtccctcagtgggcggctgccgccatgaactcaatgcgaaatcgtttgatatcagatattactaaattaaatattgaaattggggtttactccggataccaaaccagttataatagaaatatgttgggttatatcaaagaacattggattgatgcagcttgtgttggtgaccatgttcaggtacatatccctcataatatgatacctgtgaaaattaaagctatcggcaaaggctctcggcgcgtagtgaataacgacaaatatggattcccatgcatcaataaaaaaactggtgaacaacaagccgctggaaatataaaacgcatccatggattttcaacaggagattttgtacacctatccgccaccggaaaatataccggtgaatataaaggacgaatagcagctatttctaaacgagggattttagcatttaaactaaaaataccaattccaacaattgttaaaggcgtacctaaaatgcaaaatatgatttatagcaattataaaaatttccgattaatacaacatggggatagttatgaataccattaa

SEQ ID NO: 1093 - DNA, 271 bp, Unknown
  Ga0114977_10001865 JGI
gatgcaataataagttttgttaggatggtttttaaactatcttaatgttcaaccagactaagttattagatttatctaataactacgttatgaagaaaagttaaagacttacctatgggtgcttctccagcccgtagctctaagagtacagaactaaacaggggctaaatcgatggcaacagtgggtgtacatgaacttatttataagtttgtcgaggagagcagtactaggtgggagaccacatttttatataggaaaaatatgaacaga

SEQ ID NO: 1094 - DNA, 726 bp, Unknown
  Ga0137384_10058259 JGI
atgtcacgcctgttgattgtggatgcccaacggcgtccgttgatgccttgcacgcccgcgcgtgcgcgcctgctcttaaggcagcggaaagctacagtgctgcgcaggtttccattcgtcttgattttgaaggaagcgaaacaggaaccagtcggtcaccccctacggctcaaacttgatccaggctcgaagacgaccgggctggctgtggtcaacgatgcttctggcgaagtcgtctgggcagcggaaatcacgcatcgcggggatcaggtgcagaaaaacctgctgactcgccgaagtgtgcgtcgccgccgtcgccagagacataccagatatcgccaagcgcgctggctcaatcgtcgtcgtcccaaagggtggcttccaccttccctgcgttcacagatacaaaatgtgctcacctgggtcgtacggctctcgcgcttttgtcccattggcgcgatctcgttcgagctggttcggtttgacatgcaactgctccagaatctctcgatcgagcgcatacactatcagcgcgggacgctttggggcacggaagtccgccagtacctcctcgccaaatgggagcatcggtgtgcctattgtactgcgactggattacccctggagatcgaccacgtggttccacggagtcacggaggcagcgaccgtgtggctaatctggtcattgcctgccgggcgtgtaacctggccaagggggacaagctc

SEQ ID NO: 1095 - DNA, 311 bp, Unknown
  Ga0137384_10058259 JGI
gtcagcgaccccagcgctgaacgcgcggggcttgcacatgtgcaagccccgaagctgaccagccccctccttgccaggcaaggaggagccgttaggagagaaagcataggcaccggcgagtgacttttccagctcgccgctctgcgattgcacattaaacagcgtcatggggttcaaaacgcagtgtgtgcaatgtatgaaacctttccataactgggcgaggaaaaccttaccgttgacgttttccgggcagccggcaacgccaacgcgccgcctcataacgaggcacgtttggagggagtatgtcacgc

SEQ ID NO: 1096 - DNA, 1338 bp, Unknown
  rank12_10070934; GENOME_ACESSION: IMG_3300001484_$F_3300001484
atgatgaacgaagcagtttacatcatcggtattaacggtaaacctaaaatgccttgtttcagaaaaggcagaatcaggcatctgttaaaagaacacaaagcaaagtgggtgaagaattcagtcttacctactctgcaactcttgtacgaacaagactgtgtctacactcaagatgtaaatcttggtttagatgagggtgccaatcacatcggtgtggctgcaacttcacacgggaaagagattctgtctcttgaacttgaaatccgaagcagtgacatcaagaaatgtaaagatgagcaaagaacaaacagaagagacagacgtaacaggaaaacccgttacagaaagccgagattcaataatcgggttgcatcgaagaaagaaggatggctgtctccaacagccagacacagagaagacactcacgtaaatctcgtgaagtatattcatcgtattcttccaatcagttgtcagactttcgaagaaggcagatttgatacccaaatgatagaaaacccggaaatcagcggcactgactatcagcacggaaagatgtatgagcatgagaacttcaaagagttcgttcgctacagagacaactatacgtgtgctatctgccacacaaggggaaagggtgatgtgcatcatatcataccggtctcaaaaggaggcactaaccgtgccgacaacggtgttttcctctgcaagaaatgtcacgaagatttacataaggggaaagtcaaattaccagagaatatcaatcttgctgcaaagaatctaaagaatctgaaagatgcagcagcaatgaacactatgtcaaaacgactcatcaaaagaatgtgtgagacatttcccaatgttatcacacgacggacgtttggttctatgactaaagcgaagaggtttaaatacaatatcaaaaagtcacatgcggcagatgcgcgtgtgataagcggccagccagaagcgacaccgctcggatacacatactgcttgaaacaattgagacgccataacagacagatgcacgagcatcagccgagaatcagaaaggcacacgacgggaaacccggcatggcaagagcaagaagacggaaattgggatatgttcgaagagagtgtaaggaaatcaaatctgttttcggtttcacaaaacgaagcatcgttttgtatgaaggaaagaaatggatgataactggtctaagacagaccgggttcttttctttggtaaatataaaagacaaaaaagagaaaataaattcaatcaaatatacaaaactcaaacttataaaacctcaatataaatcaattgtaatagatgatatcagaagattataa

SEQ ID NO: 1097 - DNA, 315 bp, Unknown
  rank12_10070934; GENOME_ACESSION: IMG_3300001484_$F_3300001484
gtcaccaaccggctaagctaaagacttagcggcttggctcctcaacgaatcaaagctgatggtgactagcctaagtgaaagagcatatgctctcgaactacgttactggcgaatacataggtaccaagggatgttcgtcctagtcccttgctctacgtctgggtattaaacagtcctgtccggtagggacagtgtattcagaatataaaccgctggataacattggcgaagggcatctacagagacagtagtctctgacttacagatttaatctgttattttaaaaaattaattaaacaaatgatgaacgaagca

SEQ ID NO: 1098 - DNA, 834 bp, Unknown
  Ga0116142_10030893 JGI
atgaaaatggtgtttgtggtagataagaataaaagacctttaaatatgtgtcattctgcaaaggcaaggaagttattgtctgataacaaagctgtagtaatttcttattatccttttgttatccggttaaagaaagaagttaatactcctatagtagcagattatcaaataaaaatagatcccggtgcaaaatggacaggtttggcaatattgcagaatgaagttaatgttaactttttaggagtattaaaacataaggcatttgaggtagtggataagttaaaatccagaagctctttaaggcatgggaggagaagcagaaaaacaagatacaggcaaccgagatttgataatcgtggaaacgctagaaaattaggtagaataatgccttctttaagatcaaggtttgataatattacaaattggattaagaagttacagaagttctgccctataggagaaattgtttatgaaaatgttaaatttgatactcagttattggaaaatcctgacatagtcggaactgaatatcagagaggagagttatgtggatttgagataattgaatacttacgagagaaaacgggctttaaatgtgcttattgtggaaaggggggaatgaaggaaaaattagaagtggagcatattatcccaagaagcaggaatggaagcaataggataagtaatttaaccttggcttgccataagtgcaatcaaaagaaaggaaatatgaccgctaaagaatttggtaaacctgaagttcaaggtaatgctaaaaaacctttaaaagatacagcaatggtaaatagttctcgtaaaagaatgtatgaagaa

SEQ ID NO: 1099 - DNA, 283 bp, Unknown
  Ga0116142_10030893 JGI
ttcgaaaactactattcacaaattcgagagtgaaaactctcactatgtaaccagccataagtcgagtgactacgttagaaatgttatgacacctacggatacttcctcagttcgtagcaactgtcaagtattattaagtgaggtcttgattgagactacagtataatatttatgtaagcatacctaacattggcgaggggagatatttcgaaagaagtacgttacctgttgatataaataaacaacagagattatctgaaaagataaggagtaaatgaaaatg

SEQ ID NO: 1100 - DNA, 1407 bp, Unknown
  Ga0180432_10045612 JGI
atgcagaagttattagcaaagtttgagaacgtaccagagaatgcttctctagttctctgctctacaagttctgatttaaacagagaggacactctcagtgatcagaacatacaactgactaataacactcccgaagagaatcattcccaacgtacagggaggtcattaaaaccatttgtgtacgtattatctaaacaaggcaaacctttgatgccttgttctcaagccaaatctcaaagaatgttaaaaggaggaaaagcacatgttataaaaagaactccgttcactatccaattgaattttgaatgtgcaaacagaattcaaccaataacttgtggaatagaccctggttattctcatattggattcagttgcactactgataacaaagaactcttatcaggaacagttgaacttgataacaatatgaaatcaagacttgatgacagacgaatgtaccgtagaaatagaagaaacagactatggtacagaaaaccaaggtttaacaataggacatctacaaagaaaaaaggatggtttgcaccatccattcaaagaaaacttaacactcatgttaatcttgttaaaaaactaaaacaaattctcccaataacaaagataatagtggaagcagcaaactttgacattcagaaaattaacgatccaaacataaagggagaacaatatcaacaaggttctttgtttggatatgagaacttaaaagcatatttaattcacagagaacaggggaagtgtcaactatgtgggaaagaatacaataatggttggcatgttcaccacatcattccaagaaatgatggtggaacagacaaaccagacaattgtgcactccttcatgataaatgtcataagaaactgcacaagcagaagttattttcttcattgaagaaagccaaacagttcaaagcagagacctttatgtccatggttagatggagactaacagaagagttaaagaagataatttctgatattaatgtgacatttggatatataacaaagataagaaggcatgagaacaatatagagaaaacacattcaaatgatgcatttattatatcgggaggaagtgaacagggcagatgtttgtctgatataatagttcaaaagagggagaataacaggagtttgcagaagaacagaaaggggttcaaggtttctgttaggaaagagagatataagattcagtccaaagatttggttaaaatagaagggaagtgggaagagacaaaggggacacattgcaagggaaagagaataatggttaatgggaaatctattagtattaagaaagtagaagagatatataatgtagggagtttaatatggagggcggcaattcctcccctgcctaaaggcaggggtctccttgtcgcaagaggatga

SEQ ID NO: 1101 - DNA, 268 bp, Unknown
  Ga0180432_10045612 JGI
gtcaactacccctgcctaaaggcaggggcttgctccgtgaggagcaagagtaattagttgattagggagcttttaaggagacttaaatgcagaagttattagcaaagtttgagaacgtaccagagaatgcttctctagttctctgctctacaagttctgatttaaacagagaggacactctcagtgatcagaacatacaactgactaataacactcccgaagagaatcattcccaacgtacagggaggtcattaaaaccatttgtgta

SEQ ID NO: 1102 - DNA, 1350 bp, Unknown
  Ga0311361_10020611 JGI
atgcagcagttagaaaagagagatacatacacacctacggatgcttcacaagtccgtagcaactgtgattcattattaaacagagaggaaactctcagtgtaatggatttaaaaacctcttctaacaatcccgaagtgaatttacctgtccatagcaggggcttagagccactaatctatgtattaaatttaagtaatgaacctttgatgccgtgtacggcttgcaaggcaaagaaactattgaaaactaataaagcaatagttgtaaaatttaaaccttatactattaaacttaattttgaatgtgaaaataaaacacaagaggttactttaggaattgattctggaagtaaattcattggtttctctgccgtgtcagatgataaggaactaatttgtggtacgttaattttagacaataaaacaaagagtaggcttactgaaagaaaaatgtatagaaaatatcgtaggaataaactttggtatcgaaaaccaagatttttaaataagaaaatcgaaaaaggatggctaccaccatcaattcatagaaaatatgatactcatttaaatctaattaatcggattaagtatcttttaccaataaataaggtagttattgaagttggtaattttgatattcaaaagatagaaaatcctgacattaatggaattgaatatcaacaaggcaataagtttggttatcaaaatacaagggctttcttaatgttcagagaaaaaggattgtgccaattatgtggtaaatcatttacgaaaggaaatacagcccacgttcatcattgcaagcaaagaaaagattctggttctaattcggttaagaatttagttatattacataaaaaatgtcatgagagattacacaaaaaggggttaaaattaaagactccgaagtcttataaagatgcttctttcatgaatatcatgaaaaataggtttgtcaaagatattcctgatgttgaattaactttcggttatataacttttataaatagagtaggcttagacttagaaaagactcattataatgacgcttttgtaattggtgatggttcagttcaagacagaattaagccaatagaaattatacagaaacaaataaataataggacacttcaaattaatagaaagcattttaagcctgccattaggaaacaaagatactcaataaggccaaaagacttggtatttgtaaatggtaaaattcattctgttattggcacacattgtaaaggtcgtagtataatattagaaaataaaataaataatcagaaatcaatatcgttgtgtaaaatagaaaaggtgtatcactttggtagtttagcaataagataa

SEQ ID NO: 1103 - DNA, 276 bp, Unknown
  Ga0311361_10020611 JGI
gtcaatcacccaaagctgaagcaagcagtgggcttaacccgtgagggataagagcaattggttgattagggagcaataaaagaaattaaaagcaaaatttatgcagcagttagaaaagagagatacatacacacctacggatgcttcacaagtccgtagcaactgtgattcattattaaacagagaggaaactctcagtgtaatggatttaaaaacctcttctaacaatcccgaagtgaatttacctgtccatagcaggggcttagagccactaat

SEQ ID NO: 1104 - DNA, 1275 bp, Unknown
  Ga0163148_10007436 JGI
atgtctaaccaaattttcgttctagatgccaacaaaaagcctttaaccccttgccgccctattacggcaagaaaattgttagaagccaataaagccaaggtatttagacagttcccattcacaatcatgctcaaaaaggaagttactgccacaccggaaccgattgagttaaagcttgacccaggttccaaagtaacgggcatagcccttaagcaaggaaacaaagtcatctggggtgcggaattaacccaccggggcggcgcaatcaaagcaagcttagagtctagacgttcccttcgtcggggacgtagaaaccgtcacacccgttatcgtcaagctcgattcctgaatcggactcgttcaaaaggttggttagctcctagcctcatgcaccgggttcggactactgaaacttgggtcaagaaattgattaagtttgcgcctatcggctcaatcgttcaagagttagttcgctttgatttgcagcaggttgagaacccggaagtcacaggtgttgagtaccagcaaggcgaactagctggctacgaagtcagagaatatctacttaacaagtgggacagaaaatgcacctactgttctgttgagaacgttccgctacagattgagcatattcaacccaaagctaagggcggttccaatagaatctctaacctgtgcttggcttgtgagaaatgcaatcaaaaaaaggggactcaggatgtcaaagactttttggctaagaagtccgaccttttgaagcagatcttggctcaagctaaacgccctttgaaggatgctgccgctgtgaattctacccgttgggctttgttcaacaccctaaaagaaacgggtctacctgtttctactggtagtgggggactaaccaagttcaaccgaacccgcttaggtttgcctaaaactcattggctggacgcagcttgtgtgggacaggttgagacattggaagtattaaccatccagcccttgctaattaaggcaacgggtcacggttctaggcagatgtgtaggacagacaagtttggttttccttcccggtatgtgcctaggttaaagtttgtgcaaggtttccagactggcgacatcgtgaaagcggtggtcacgaaaggaaagaacattggcacccatgttggtagggtggcagtgaggacaagagggatcttcaatatctcatccgctctgggtttgattcagggcatcagtcacaaatactgcaaaaccattcacaaaaaggatggctacggttacggattttaa

SEQ ID NO: 1105 - DNA, 273 bp, Unknown
  Ga0163148_10007436 JGI
gtcagatacccagccctaaaggactgagcttgcagactgcccgactctagcgagcgggtataaaccaagctaatctgaccagcctaagccttaactggctacgttttttgagtcacgacaccgggcgaatgcgaagctagttccctgccctgtcgttgaaagttaaacagtcttaaggtcactgagacagtgctttcagcctaacaagctcttaaaacagtggcgaagctaacttaacgtgaaaacagtagagacaaaaccatgtctaaccaa

SEQ ID NO: 1106 - DNA, 1104 bp, Unknown
  Ga0272448_1029175 JGI
atgaattacgttccggtcatctccagtaccggtaagcccctgatgccctgccacccggccagggcacgggagctcgttcgcaggggccgggcagtacgcaggttccggaaagggtttttctacatccagcttctcgaccgcagcgaggggcaaacccagcacgtgatatgcggtatcgacccaggttccaaaagggaaggattcacgatcaaggacacaaagcgcacgttcctgaacttattggcggatacggttacccacgttaaggaggctgtagctatcaggagaaagatgcggcggagcaggaggtacaggaagaccccctgtaggaagcctcgggctaacaggagatgtggcggaattccgccttccattctggctaggtggggttggaagcttaggttgtctaggtttttatgctccctgtaccctatcgacctgttcgtggtcgaggacatcaaggcaaggcttcgcaaggggcagaagaggtggaacgtctccttctcccccctccagatagggaaggaatggttttactgggaactccgcaagctcgccccggtgaccctcgttaaggggtacgagaccgctcaaatgcgggaggagctagggttgcgcaagtcctcccggaaggacgaggagagtttctggtcccactgtgtggactcctgggtcttggcagcatccgccgttggtggatcggttccagaagacacctggatcgtccggatcgcccccttgcggtttcgtaggcgatccctgcatctgcggcagtcagctaaaggtagtgtacgcaggcggcatggcgggacagtcagcttggggctccggcggggcacgcaggtgctccacccgcgcttcgggttctgctatgtcggcgggtatatgggggaccgccttagcctacacgcggtgcgagatgggcggcggctgactcgaggggcccgccaggaggatctgacggtgctcgcaccttgctcttggagggtgtgggtgccggagaaaagggtgaaaggaggtacattctatgagaatacgagtgacttcaccggacacttgtgtgaggttgaatcttccggggggattcaaattcataacggctga

SEQ ID NO: 1107 - DNA, 246 bp, Unknown
  Ga0272448_1029175 JGI
cttgaagaccgagatgtctcgggtatatgtgttgtggaagtggggaatcctgagcgagggaggaccacttgcacaatgttaacggatgcccgagactttgccaactatgttttggatgaatgtcaagtaccccggactgaagtccggggcttgtgaggagtagcggaaatgccgaccgcgaaaccgcaagacaccgtgcaagcggtgggaaaaactagcctggccgagcaaccggacccagtaatg

SEQ ID NO: 1108 - DNA, 1365 bp, Unknown
  Ga0224414_10007183 JGI
atgcaaagctgcgtatttgtgatgagcaaagatggtgaacggctcatgccgacaaagcgatctggccgagttcgccatttattaagagatggaaaggcaaagatcataaaccacagaccgttcaccatacaactggtatatgaggtcagtacatatacccaacctatggagttgtgtcaggatacagggtatcagcacataggaatctcactgaagtcagaagcgcacgaatatgtgagtgaagaacgaatcctgctgaaagacgaaaaacagcgtcatgatgatcagcgaagatacaggcgagacaggaggaaccggcttcggtacagggcagtgcgcttcagcaactgcaaacggcgggaaggatggctggcgccgagcctgcagcacaaagcagatgcgcatgtgaacgagatcatcagatatgcggcagcagctccgataacggatatatacatggaactgggagaatttgatccggcactgctgaaagcgctgggcaaaggagagccggtcccggagggatccgattaccagcatggcgatctctacgggcaggaaactctgcggaaagcggtctttcaaagagatgggtacaaatgctgtatatgcggaagaggagtggaagaaggggcgatactgcatatgcatcatgcgctgttctggaaaggtcggcacggcagtcagatcgatgagcttgccactgtatgcgagaaatgccatacatccgcgaaccataagaaaggcggattgctatggggatacgagccaaaacggtttgcaagtcttgagaatgcgacttttatgaacaccgtccgatggaatatctacaacagagtaaaaaagcagttggaagatatcaatgtccatataacatacggtgcaaagacatcaacagagcgaaaactgctgaatatggaaaagagccactgcaatgacgcatattgcatgggtaactacagaccggaggacagagcagagcagcagacatttcagaaagtgcggaggaacaaccggatcctgagcaaattctatgacgcgagaatagtggatatacgcgatgggaagataaagagcggatcggagttaggaagtgagcggacaaaccgcagggaatcgaggagcagcgataaaagtctgaggcaatacagagggactaaagttactaagggcagggtgtccgaaagaacgcagcactatcagataagaccgggagacattctgctgtggaaaaacacgccatataaggcaacaggagtgcattgtaacggaacaagggtgctcctgcaaaacaaaaagagtgtctcattaaaacaaataacaatacaaaaacatataggaggatggcagtttctccacgcctga

SEQ ID NO: 1109 - DNA, 318 bp, Unknown
  Ga0224414_10007183 JGI
gtcaataaccccgcccgattcaaagaatcggacgaggcttgtccagtaggataagcctgattgataagcctgagtcttgaaacagagactacgttatgcagtgacgcataagcaactcaccttaggatgctccacaagttctaagctctgaggatatgcattaaacatctctgagggtaggagaagtgtgcatattttaaaaacctgcataacattggcgatgtggaccacagcaatggcggagagatccgtacatgctgaattatccggatggccggatggaaaaaaggaaaggaattctgccggatgcaaagctgc

SEQ ID NO: 1110 - DNA, 1227 bp, Unknown
  Ga0182027_10069116 JGI
atgaaagtctttgtaattagtaagagcggtaagccactaatgccaacttgtccggcaattgcaagattgttattaaaaacaggtaaggataagtgtattagggtaacaccatttacaattaagatgttggttgagacaacggagtatactcaaccagttgaagcgggaatggatacggcggggaaaattatgggttgtgccgctaaaacaaatggagaagtagtttatatgtcagaagttattttgagggatgatattcataggaagatggtacaaaggaaaatgtatcgtagccatagacgatataaaaagactcgttatcgtcccatgagatatagtaaccgtatatctgcaaaaacaaaaggacgaatggctccaagcattaagtctaaggttgattctcatttgagagagaagagttttatggaatcaatattgcctaatgtaaaatggacaatagagattgctaagtttgatttgcagaagataaataatcctgacattaagggaagagaatatcaaaatggtccgatgaaagattattataatattaatgcttatgtgttgaatagggataattataaatgtcaaaaatgtaaagggaaaaacaaggacaatagattgcacgtacatcatattatatggagaagtattggtggaacggatgggccaagtaatagaataactctttgtaaaacctgtcatgatcgattgcataatggagaatttgatataaaagggagtaaatcaaaatctaaatatgcgtctgaggtgtcaatgataagttctcaattgcagaagtattttggggaacataaagaaacatttggatatgagactaaatataaaagagaacaaattttaggattgcagaaagaacattattttgatgcggttgctatttgttgtaatgataatgaaaaagtaaaagtaagtaatgttgtttatattaagagacatgtttctgctggggattatagacagacgaatggcaagagaagtgaaaagaaaattcctacgggtaaattgtttggattgagaaaatatgatttgattaaaactaaaaaaggaattgggtggatttcgggcaaaagaagtgaaggattttttgaattatctgagataaatggaaattcaatatgtcatgctattaatataaaaaaatataataaacgtatttctgcgagatcgaccacattggtttctatggtaaattcaaacagataa

SEQ ID NO: 1111 - DNA, 283 bp, Unknown
  Ga0182027_10069116 JGI
atcgtctaccattatcctaattcgttagaataatcctttcggggtaagacgatcagaccactaattggattcgttgattagtagccgttatctaacatgtagaaaccttcagatgccgtcccagttggaagctctttcgtggctctgtaaacagttctaaggtaaggaacagtcaaccacagcgtgaaggttagataacaggtcgagggaaggtcggattctggtattatccaaaatatcagatacgcataactccaagttgttggaaggatataagatgaaa

SEQ ID NO: 1112 - DNA, 1320 bp, Unknown
  Ga0307430_1002475 JGI
atgaaggtctttgtactcaacaagcacggggaaccgctgatgcccacgacgccacgaaaggcccgtctgctgctgaagcagggcaaggccaaagttgccggcagggagccgttcaccattcagcttttgcacggatcgagcggctacaagcagccggtcaccctcggcgtcgacgggggctatgcaaccatcggatactctgccctgacggagagagaagaactcatcggcgggcaggtgcacctcctggccggggtgtcacagcggatcacggagcgaaagatgtaccgcaagctgaggcgcaggcgaaagcgataccgtgccccccggttcgacaaccggcgtaagccggagggctggctggccccgtcggtgcagcacaaactggacgcccacttgaaattgatcacacgcgtccgctcgatccttccagtaacacgggtgatcattgaagtcgcgaatttcgatatccagcagatcaagagaccggacatttcgggggtcgagtaccagcagggagaacaggcggggttctggaacgtgcgggagtacatcttgcacagggacgggcacgaatgccagaaccccgagtgcaccaagaagagcgttgtgctcaagacgcaccacctggggtattggaagaacgactacagtgacaggccggacaacctgatcacgctttgtaccgagtgtcacacgcaagacaaccaccggccgggagggcttctctacggatgggaaccgagagtcaggcccttcaaagctgagacgttcatgacgacggtgagatggcgcttgatcgatgcagtcggagcggaggcgacgtatgggtacctcacgaagagcaagcggatcgcgctaaagctggagaagagccaccacaacgacgcgttcgtgatcgcgggcggggcggaccaaacgcgggcggaggcggcggatttcgaagagatcaagaatcacgcccgtgcgcgctccaggttctacgatgcgatctacgtcgacacacgtacgggagagaaggcatacgggaaggagctccactgcggcagaacgacgcggaacaggaacctgagcggggaaaacctgagaaagtatcgggggcagaaggtacgaaagggcagagtctctatcaggcgcaacgactatccgatccgtcccagagatatcgtgttgtgcgacggggagaaacacgtcgtgaagggaatgtgcagctatgggaaacaggttgagctgtatgtgcctgatggcaagccacggtacgtcgctacgagcaaggccgtgccgctgagaaagaggagggggttatgcgctgtcgtttga

SEQ ID NO: 1113 - DNA, 291 bp, Unknown
  Ga0307430_1002475 JGI
gtcagcaacccgccccccgaaggggttaggcttgcgggagatacttgcaagcccggctgatcagcctcagccaccagccttcgggctgatggggctacgttcattgcgaatacataggcactttgggatattgccaagtcccaaacactgcgggccaagattaaacatcgctgagggtaggcgaagtgttttggccgacaaaccgctttgaacattggcgatggcaaccactcccacaagggaggcaagcttcttgttagcttgcacactatcaggagcacgacgatgaag

SEQ ID NO: 1114 - DNA, 1008 bp, Human gut metagenome
atggcagtatgtgttttaagtgcaaacggtgaacggctgatgccgaccgaaaattacggcaaagtgcgccatctgctgaaagatggccgcgccgtgattgcgaagcgaaacccattcaccatccagctgacctacgataccagtacctatacccagcccatcgaaatgtgcgttggcaccggctatgagcatatcggcgtcagcattaagacgaaggcaaaagaggtcgtatcgcagcaatatgatttgctcacgaatgagcgctcccgccatgacgactgccgagcgtaccgccggacgcgcagaaaccgcctgcggtatcgggctgcacggttcaataaccgtgtatccagcaaaaagcccggttggattgctccgtccctggataacaaggtggagcgacacctggatattatctcccgctatctgtctgtcatgcctgtcaaggatgtctttatcaaggccgcgacatacgatacacagctccttgcggcgctggaggcaggggagcctgtcccgcagggcaaggactatcagcatgggccgcagtacggccacgatacgctgcgggaagctgtctttgaacgggaccactatacctgtgtgtattgcaagagaggtctgaaagacggcgctatccttcatgtccatcacgcctactactggaagggtctgcatgggaacagcatgagggagcttgcgacctgctgcgagaagtgcaacacacctgccaatcacaaggagggcgggaagctgtggggcttcgataagcctctgcggaaatataccggcgaagcgtttatgaatagcgtgcgctggattctctatcagcgtgcgatggctcgcttccagggtgctgcggaagtacacatgacctatggcgtcatctccaagcgtgttcgcaccaacctcggcctcccgtattcctgcgctacggatgcctactgcatgggcgagctgcgtccggaagccagatgcgaaacagaggtcttccagaaatacaggcga

SEQ ID NO: 1115 - DNA, 440 bp, Human gut metagenome
gtgcgtaccatcaaacccggtttatccttggcgatgtggaccacagtaacgccgaatgagcggcaagtgctgatttacctttttggtttgtcatttgaatattaccatttctgtattcgttgatgcccccgccaaatgacaggtagctataccatggctgggactacatcaataagcgtgtcggttgacgtcccccaccaaatgacaggcagctataccaagaagcatctcacacattaaattagttcggttgacgtcccccaccaaatgacaggcagctatacctgaccccccatgtaaaccctgcgatgataatgttgacgtcccccaccaaatgacaggcaactataccctgacggtgaatgcctttacctgtgccaccgttgacgtcccccaccaaatgacaggcaactatacccggctgcgaaagggaaaagaaa

SEQ ID NO: 1116 - DNA, 1470 bp, Unknown
  Ga0190313_1000813 JGI
atgatcgtatttgtagtagattcacgcaacaatattggtcatcccacacgcaagtgtgacatgatcagacgattattaaaacgtggcaaagccaaagttttaaaaggcggactcaagtcaggtcagcctatattagtacaaatattcaagaagtttgataagtcaaaaacaatcgattgcgaattcagagtcggaatagatcctggatacaaacatatcggttattgtgtttacaagatatatagtaacaaagttataaagttgttttcaggcgaacttgaaactagaacatcagatgttaaagacgggttagatactcgtcgaatgtatagaaataatcgacggggcaatcatagaaagaataataaacgcaaattcaaggtggctaaatttaaacatccaatttggaagaatcgacgcaagcacaaatttcaaccgacacattggcatttgattaattcacacagcaatctattaggttggatttttgatagaataccattagatcaaagtaagttacatgttgaatataataagtttgatttgcataagataattaaaccgaatattcgtaattggcaatatgcaaaaggtacacaatatggtttcgagaatactaaactatatgttcgaaatcgagataattatcaatgtcagatatgtaaacagtatattggtcgattaccaaacgaagtacaccatatagtttggaaatcaaatggaggatcagacagtccacttaatttaatattactttgttcggaatgtcataaaaaagttcacgcttgtaaaatagtatgtcctactaaatcaggatcagtcaataaatatcgtgatgctggtgtattgaattcatgtatgaagcatatgtttgctgaatatgaaagtattataccaacgcaagatacatatggatatattacaaatgctgtccggaagcaatggggattagaaaagacccatgcaaacgatgctagtgtaatagcaatatgtgattcgaatggctttatggaagagcttagacaatatactcaatggtcggatgaagatgtaactatcaattttaaacagtatagaagacatgttcgtaattgggtacaacgatatgaagatcgaaaatattatattgatggttttaaaaatcctagaaaagcgtttgcgtggaatcgtaatcgtcgatctgggcaagctaagaacaagtgtagtttagtagaattaaaacaaaaattaatatctaaaaatgcattaaataaagttcagattattgctaaacctggtggaagagttatgaaacaaagtgaaaagaagatgacatttcgtcgtggtgatataattcgttgttcgaaaggaactgcaactgtgcaatattatgagcttgggcataaagtaattaatactgttcaattatgcaaaattaaacaaaaatattgtaccaaaatattaaacaatagcggaatgtgtgtaatttag

SEQ ID NO: 1117 - DNA, 301 bp, Unknown
  Ga0190313_1000813 JGI
ccgatcattaacccggacaacccttttaatttatgcggcgaaataattaccaatacctaagtctaatggattagggccgcgacagacgtattgattaaatgttcaccctagaatgccattcccagttccaggctctggaggtgtcggtgcttaatattattatttaatattaagtacctagtcctcattgtcgacaaagtaggtaacgaaagtcgatattacatttaatcaagtcgagggagaccaatctaactttttaagttaatctctatcatgagattttttaaggagatacatgatc

SEQ ID NO: 1118 - DNA, 978 bp, Unknown
  Ga0272429_1007931 JGI
atgtcaacgattagtcattcaatcccggtgattggtgtcgatgggacgccgctcacgccgaccgtgccgtcgaaggcgcgcaaactcgtcaaaggagggcaggccacgggcttctggaacaagctcgaccagtactgcatccgcctgaccgtggagacacggacgggcgggctcgacgcggaactgggcgtcgaccccggcgccaagtatgacgggtacgccgtcgtctgcggcaacgagaacctcctgaatatcaaggttgatgtgcccgacaaagagaagatcgtgcgcaagatcgccgaacgtcggcagctacgccgggcgcgtcgttcccgcacatgccgtcgccgaccacagcgcttcagcaatcgtcgccgctctcctgggtggatcgcgccgagtcaactcgtgctggtccaggtgcgcctcaaggttttgaccgtgttgtgtgacacctatccgatcaccaacgtcgggttggaggatgtggccttcaaccacggcgcacaccgttacggcaagcacttcagtaccgctgaaattggcaaggccagggtgcgcaccttgctggaagaacgagggacgttggtcgcgcgcttcaggggctacgagacgaaggcgctgcgcgagggctacggctacaagaaatccagtagcaagaaagctgatcgcttcgaagcccactgttccgatgccctcgcgttggccctggcggtgcggcgtgacgcctctctcgcgccggggccgttcgtggtcattgatgatcgctaccgcgcggtgcggcgtcgcttacacgacacgcagcccgcgccgggtggcctgcgcgcgccgtacagcagcggggttgtctttggcttgcgcaagggattgatgatcgggacgccgcgcgggaaggttggacaactctgcggagagttgaaaggaggttatcgctattacgacaccgacggaaagcggcaatcgaccacaaagtgttag

SEQ ID NO: 1119 - DNA, 270 bp, Unknown
  Ga0272429_1007931 JGI
gtcaagaaccgccgcttgaaagcggcggcttgaaatgagggtatcaccgaccgcgcgcggcgaacgtgcgcgggagttttgactagggggcatcatccgatgcagacgctccgcagggctacaagaacgtccgactgcttcacgaggccggaccccttcgctagaacccttcaatagcacggtacgtttcggcgcacctacgcccggcgggcacccccgacgcgagaagacatccgaaaggatggttgtatgtcaacgattagtcattca

SEQ ID NO: 1120 - DNA, 978 bp, Unknown
  Ga0137383_10000411 JGI
atggtgttcgttttggacagacacaagaagccgttgatgccctgtacccccaggcgggcgcgactcttgctcgcgcgccggcgggcggtggttcatcggatcaggccgtttgtcatccgtttgcgagaccgacgcacccaggacagcgtgctacaagagagcgtgctcaaaattgaccctggcagcagaaccagcggcatgaccctggtgcgggcagaagagacgccagcgggagaggtgcatcatgcgctcttttgctccgaagtgcagcatcgaggagagctcgtccatcgaggcaagcagacccaaagcaatgcccgacggcgtagacgcagtgccactctgcgtcaccgcgcgccacgcttcgacaaccgggctgttgccaaagggtggctgccgccctcgatgtgctcccgtgtgggtaacatcctcacctgggccaggcgatacagccgatgggtgcccgtcggcacctggacgggaggacgaacgcggtggaaccgggcgcgcttgggcatcgcgaaaacgcatgccaacgacgcgttgtgcgtgggagagatcgcgggcgtcaagctcttgaggctgaagacgctccggatcaaggcaacaggccgaggcgagcattgtcgcaccaactggacagcagaaggcttcccgcgcggctacaagatgcgtcagaagcaggtgcggggctttaagaccggcgacttggtgcgagcggaggtgccagagccgctcacgacggcaggtatccacctgggtcgtgtggccgtgcgggcttctggctcgttccgcgtgggcaaagtggacgggatccacgcgcgttatggtgtcctggtacagagggcagatgggtatgagtacgaatggaccgagcagcagaacaggaggctgttccccacccctgccccaaggaaaggaacgcctgcttcctccccatctttgaaaagtggggcatccgcaggcggggattggtga

SEQ ID NO: 1121 - DNA, 319 bp, Unknown; identical to SEQ ID NO: 137
  Ga0137383_10000411 JGI

SEQ ID NO: 1122 - DNA, 975 bp, Human gut metagenome
ttgagagtatttgttttaaacaaacgagggcaaccgttgatgccgtgctcaccggcaaaagcaaggctgcttctcaaagagaagaaagcaatcgtcaaaagacgcacgccttttacgattcaacttacgatcgcaacgggcgaagcaaggcagcctgtaacgcttggcgtggattccggctacaagcacattggtctttcggccacaaccgaaaaggccgaactctatgcctcggaagtcgaactgcgtcaagacatcacggatcttttgtctgcccgtcttgctttgcgccgctctcgccgcagccgcaagacgcgctaccgtgcgcctcgtttcgacaaccgggtggcaagcaagcgcgaaggctggcttgctccttctgtggaaaaccgcattgcggcgcacatgtcgcgtgtagaagcggtcatgcaggtcttgccggtgactgccataaccgtcgaaacagcggcgtttgacacgcaactgctgaagaacccggacattgccggagaggcgtaccaacaaggcgaacagctcggattttggaacgtgcgggaatacgtgcttttccgggacggacacgtttgtcagcactgccgcgggaagtccaaagatccgatactcaatgttcaccacattgagagccgacggaccgggggcgatgcgccgaacaatctcatcacgctgtgcgagacctgtcacaaggctttccatcgaggggaaatcgaactcaaagtcaggcgaggaaagtcgttcaaagcggaaaccttcatgggcatcatgcgttggacgctctttgagcgtttgaaaaaggctcacccggaactcagagttcgcaacacctacggttatctcacaaagcacaagcgcatctcacacggaatcgcaaagagccactgtgcagacgcgtactgcattgcggacaaccttggtgcaaagcgactggagggctttttctttcaaaagcaaacccga

SEQ ID NO: 1123 - DNA, 250 bp, Human gut metagenome
gtcaactaccccgctctaaagagcgaggcttgataaaagccttggttgactagcctcagaccgccccaaaaggcgggctacgttggttgggaatgcataggcaccgcgggatgtcaatcctagtcccgcgctctgcggttcgcggttaaaagctctgagaggtaggagcggtgccgtgaacaggtaaaccccttccaacattggcgaagaatttcaaccggtcgcaagaccgaggagtcaaatcttgaga

SEQ ID NO: 1124 - DNA, 1428 bp, Unknown
  GENOME_ACESSION: mgm4547164.3 MG-RAST
atgaaaccagtatatgttgtaggttataacggccaagggcttatgcctacgaccccaaggaaggcaagaaaactagtggaatcaggaagagctgtagtgctttttaagactccgtacacaatcaaacttctgtataaaacaggagttaatactcagcccacattcgaaggaacagatacgggaagccagcacataggcgttgccgtaacaacggatgagaaagtcttatcaaaggaagagtatgcacttcgaagcacaatggacaagcgtgctcttatcgaaacaagagcttcttacagaaagggaagacgttatcgcaaaactaggtaccgtcatccgaaattcagaccacatacaaaacgagtctatgtggaaaaaccagttcgttataataagcacttaactcactggaagaaatgtaagaatgtattcgcatcaagtaaaaagaagggatggcttccgccatccatccagtccaagtgtgatatgacgatgcaaatcatagacagatataagatgatacttccgccaaagacaaggtttcgtcatgaagtcggaagattcgatatcgcaagaatcaaagacccgtccattcacggggagatgtatcaatacggacgtctttacgacgaggagaacgtcagagcctatgtgtttgagagagacggttacacttgcaaagtttgcaagaagaaggccggttctaaacgaaaagatggttctacagttaaacttgcggcacatcatatcgactttcgctccaaaggagccacagataatcctgacaggatgataactgtgtgtgacggatgccatacaacagttaatcatcaaaagggaggaattctttatcagtggatgcttgatgagaagaaagtcgccagaggatatcgagacgagacgtttatgaacatcattcgcaggaaattattcaaagagtttcccaatgacgaattcacttacgggaacttcacggctgccgacagaaagacgcttggcttagagaagacacacgccaacgacgctgttgccattgcatgtcagggacgtcctgttaaggataatcctgatacaacctattatcaacaagtaaggcataataaacgttcacttcatgaggctacggcgcgtaaaggacgcaaagaacccaaccgtagacagattcgcaatgcgaagaacacaaaatctgtcacaattgggcgctataatagcaagaaaacattttatgtatacgacaaggtttcttacaaaggacaggtgggatggataagcgggttcactaaaacggcggcttatgttaaggacaaagatgataactatatcaagtatcctgataagagttacaaccagataaatttaagcgatttgtctgtgatatcacacaacgacaattggctgattggagcagtgtctccaataggcaagtag

SEQ ID NO: 1125 - DNA, 342 bp, Unknown
  GENOME_ACESSION: mgm4547164.3 MG-RAST
gtcaactacccaccactaagcctaaggcttgaagtggggggcttgtaaaagccaacactttaggcaggcagtggagaatgttgactagcctcaggagttagatgtatttagtgcagctaactactacgttacagagatgaatacgcccaacatgctgctcaagtggataaggcgttcgggcaacggatgtctgatatagggtaagtaggacaccgacccaggagcacgaagtctctggacattggcgatgagcaatacgtgctgtggacacgggcagaaccgtcgagtctctgccgcaaatcacattcttagaggaaggaggcataagccttgatgaaacca

SEQ ID NO: 1126 - DNA, 1392 bp, Unknown
  Ga0210056_1025515 JGI
atgcagaagttattagtagagttaaagaacgcacctacggatgttccacaagtctgtagctctgtaagtcctgtattaaacagtccgtgtgaggtaatggacagtgtacaggacatacaactggctaataacaactccgatgtggaccaacttgggaacaggaggaacacacttttagtagtgttcacactgaacaaaaatggtaaacccctaatgccttgtaaacctgcaaaggcaaggcatttactaaaagaaggcaaagcaaaagtagtaagaggtcagccttttactattcaattactatatggttcgggaactgcaattcaacctattattcttgggatagatcctggatatgacaagataggattttctgctatcacagataagaaagagttaatttcaggagaagtcagattaagaaaagatgtatcagcaaaattaacagaaaggagaatgtatagacgaaacagaaggaataaattatggtataggaagcccagatttcttaatagagtatctaaaaaagaaaattggttagctccatctattaggtataaattggatagtcatattagcctgataaataaaataaaggaaatattgcctatatcagatactatagttgaaatagcctcttttgatgcccagaaaatagtaaatccagagattagtagtattaaatatcaacaaggagaattacagggatatgaaatacgagaatatttattagaaaagtggggtagaaaatgtgcttactgtggtaaaaaagatattccattagaagtagaacatataataccaaaatcaagaggtggaactgatagggtatctaacctaactctttcttgtcaaaaatgtaatctcaagaaaggaaacagaacagcaaaagaatttggatatccagaaatacagaagcaagggaaagaatcactaaaagcaactgcatttatgaataatgttaggtggaggttagttaatatattgaattgtaagtggacttatggatataaaacaaagcacgatagaattaaattagggttagagaaatcacacagcaatgatgcttttacaatagcaggtggtaataagcagttagggtcggttcaatatattggaaataggtatagaaggaatgatcgttccttacaacttaatagaaaaggatttacaccttccattaggaggcaaagatataatttacagccacatagtttagtaaaatggaacaatcaattattaagaattagaggaatatcttgtaaaggggcaagagtagttttagagaataagaaatcagtcaagatagatagtgttcaattatataaatatatgagaggatggcaattattccctgatataaatgacggagtttccttgctacaaaattaa

SEQ ID NO: 1127 - DNA, 250 bp, Unknown
  Ga0210056_1025515 JGI
gtcaaccacctctccttaaaggaaggaacttgtgaaagcaagtccctggttgattagggggtattgaaaaatgcagaagttattagtagagttaaagaacgcacctacggatgttccacaagtctgtagctctgtaagtcctgtattaaacagtccgtgtgaggtaatggacagtgtacaggacatacaactggctaataacaactccgatgtggaccaacttgggaacaggaggaacacacttttagta

SEQ ID NO: 1128 - DNA, 1308 bp, Geitlerinema sp. FC II
atgtctaattttgtttttgtactcgatacgaagcgacagcccctcgcaccgtgccatcccgcacgggctagggaactgttagccaagggaaaagcggcaatttacaggcgctatccgttcaccatcgttttaaatcgcgctgtgggcgacgtgccgccatcgtaccaactcaagattgaccccggctcccaaactaccggactcgccctcgtaaatcgcagccagctcgtttggggtgcggaattgcaacaccgaggcgctcgcattaaagcgaaattggcaacccgtcgcgtctgtcgtcggaatcgccggaaccgcaagacgcgatatcgcaagcctcggtttctcaaccgtacccgcccgaagggttggctgccaccgtctctaaaccatcgcgtcgaaaccacgatgacgtgggtgaaccgcttgcgaaaactttgtccgattgtgtgcgtctctcaagaactcgtgcggttcgatacccaaaaactccagaaccccgaagtgagtggtattgagtaccagcagggtgaattgttgggctatgaagtgcgcgaatacgtgttgcaaaagtggggtcgaaagtgcgtctattgcggcgttgagaacgtgccgttagaggtcgaacacatccagccccaatcgaagggtggaagcgatcgcgtctccaatcttaccttggcttgccgtccgtgcaaccagtctaagggcaaccgcgacgttcgagagtttctgttggagaaaccctccgttctcgagcgcatcttgagacaggcaaaaaccccgttgaaagatgcggcggcggtcaacgcaactcggtggcaactgtaccagcgattgaaagagacgggtttgcccgtcgaagtcggaacgggcggtttaaccaagttcaaccgcacccgattggggttgccgaaagctcactggctcgatgccgcttgtgtgggagagacgccatcgctgcatttagcaactgaaactccgatagcgatcttgagcaaaggtcacagcacgagatttcgcaccctcatcgaccgttacggattcccccgcgccgtgagacaaacgaaggcgcaagtcaacggcttacaggcaggcgacatcgtgcgagcgatcgtgccgaacgggaaatatcgcggacagtggacgggagcgatcgccggagtgcgaaaaaaacgcccacctgccttgcgtccttttggaaaaaaacagatcgatttaaccgctcaaacacaaatccagatcgttcacaaacaagatggctatgaatacgacattaattcgtgcgggcattcctcccgacgctga

SEQ ID NO: 1129 - DNA, 260 bp, Geitlerinema sp. FC II
gtcaaccacccgacgccgatcgagcacgggtacggcgcgggcttgaaaaagcccgacagttgaccaggctaagtcctttacagactccgttatcgaggtcacgacaccgataagttagccagcttgttgctctgtcgtcggtcgttaaacagccctactcgggttaaggcagtgcgaccgacctcacaagcctcgataaccttgccgaggcaaacgttacgtcgcctaagcgacaggagtagacagaaatgtctaatttt

SEQ ID NO: 1130 - DNA, 831 bp, Unknown
  Ga0307954_1000334 JGI
atggctgtttttgtactcgacagacagaagaacccactgatgccgtgctcggaaaaacgagcccggcttttgctcactcgcaggcgcgcggtggtggtgcgagcgtatccgttcactattcgcttgaaagaccgcgctggcggtgctgttcagaaagtcgtgctcaagatcgaccccggcagcaaagaaaccggcttagcggtgtccagagtcagcgcccaaggggagcatgtactgtgcttgatagagctgactcaccgtggccatcagatcagcaaagcattggaccagcgccggggatttcggagtcggcgccgtggtcaactgcgctaccgtgcaccaagattcagcaaccggacaaagccaaaaggttggctggcgccgagcctgcagcatcgagtggataccaccgccagcatcgtcaaccgtctttgtaccttggtgccggtgtcgtcaatcagccaagagctggtgcggtttgacctgcaacagatggagaatcccgaaatcagcggcgttgagtatcagcaaggcactttgttgggctacgaagttcgggagtatttattggaaaaatggggccttgaatgcgcttattgtgccgtgaccgacactccactggaaattgaacacattgttccgaaatcgaacggcggctctaaccgaatcagcaatctgaccctcgcctgtcacgactgcaatcaggaaaaaggctcgcaaactctggccgagttcttccaaacgtccagtcgcctgaaagacaaacagccgcgcatggacaacgtgctgattcagtgcaagcgccccttgcgggacgctgcggcggtgaac

SEQ ID NO: 1131 - DNA, 293 bp, Unknown
  Ga0307954_1000334 JGI
gtcaactaccccgccgtgaacgacggggcttgtagagaacacatttcaagccaggttgaccagggaaagcggacaccaacccgctacgtttgccacaggtcgttaagacccactccggtgtgctacctcagcaccggacactagaaagctgggatcacgctggcgaaaggtaaagcgccgaaggtttcagttgccgcgcaagcgggagccggtggtcgacattcccgaggggagagaggtttcggcctccgttacaaggcctgtaaaggcactatttggaaaacgatatggct

SEQ ID NO: 1132 - DNA, 1272 bp, Unknown
  Ga0376687_0042770 JGI
ctgctcaggaccgtcagacagcccggtaacggggccctcatccgagggcacagaaaggagtcacccatggtgtttgtgctcgaccaacacaaaaagccgctcatgccgtgtacccccaggcgcgcacgcctcctgcttgcacgcaagcgggcggtggtccatcggctcagccccttcacgatccggcggcatcggaccgcagcgtccaggagagcacgctgcaaccggtggtcctcaagatcgatcccggttcgaagaccaccggcctggccctggcgcgggtcgaggagacggatgagggggaggtgcaccacgcgctgcatcttgccgagctcacccatcggggagaagagatccgcgagcgtctgcgcaaacgggcggtctatcgccgccgcaggcgttcggccaacctgcgctaccggccagcccgcttcctcaaccgtcgccgtgcgcccggctggcttcctccgtcgctgcgctcacggatcgacaacgtcgtgtcctggacttcccgctaccggcgctgggtcccgctggtgcgcgtggaggtcgagcgcgtcaagttcgacacccagaggctcgcagaatccggagatctccggggtcgagtaccagcgcggggaactggccggttgggaagtgcgatcctacctgctggagaagttcgagcaccggtgtgcctactgcggccgcacggacacgcccttcgaactggaccatatccagtcacgcagtcgcggtggttccgaccgggtgtccaacctggcgctgagttgccacgcgtgcaacgtcgccaagggagatcacaccgccgcggagttcggccatcccgaggtggcggctcaggcgaagcagcccctgcgggatgcggccgccgtcaacgccacgcgcgttgcgctctgcgacgaactgcgcaagcttggtctgccgctcaccagccttgtgtggcggacgcacgcgctggaaccgggcgcgcttcgcgatccccaagacccacgcactggatgcggatgtcgcgtgggagcactggcgggagtcagcgcctcccggcacaaaactctcgcgatcaaagcgacgggtcgtggccgctacagccgcaccaatgtggatgagcatggcttcccggtgggctatttgatgcgccacaagcaggtgatgggcatcaagacgggcgaccgggtgctccagttcgctgacggctacgactacgcactggtggacacagggtctgagcacgtcgcagtggcgcctcccccgaccctgtgtccacca

SEQ ID NO: 1133 - DNA, 323 bp, Unknown
  Ga0376687_0042770 JGI
gtcaacgatccccacgcatgaatgcgggggcttgtcccccgggttgatgccgtcttcgttgtccagccgaggtgcccgagccttgtggcaaggcgctgatgggtaccagcgttgcgctcgtcacgacacccgcgtgtgcttcctcagcactcggcgctgtcgttcatcgttaaaagaacctgtcggggtacgggtcggtgcggtgagcccaacaagcgagcgcaacactggcgaagggagcgtcctgagcccgcctgctcaggaccgtcagacagcccggtaacggggccctcatccgagggcacagaaaggagtcacccatg

SEQ ID NO: 1134 - DNA, 837 bp, Unknown
  Ga0172375_10015289 JGI
ttggcatcaagacgttccctgcgccgcggccggcggacccggaagacccgctatcggcaggcaaggtttcttaaccggaagcgcaatcagggctggctgccgccgtcattggagagccgggttctgaacgtcaattcctgggtaaaccgcttgaggcgattagcgcccgtaagctcgatctccctggaactggttaagttcgacacgcagaaactccaaaaccctgaagtttccggcgtagagtaccagcaaggcgagcttttagggtatgaagtgcgagagtaccttctggagaaatggggccggaaatgcgcgtattgcaagactgcgaacgtaccgttgcagattgaacacattgttccgaaaattcggggcgggactaaccgggtatcaaatctaacgctggcctgtgagtcatgcaatcaggcaaaaggtaatcttaccgccgccgagttcggccatcctggcatccaatctcaagccaggatgccgctcaaggatgcggctgcggtcaatgcaacgagatgggcactgtttaatcaattaaaaggtctgggccttcctgtcgagatgggcagcggcggacggacaaagttcaatcgagtgcgccagggatacccgaaggctcactggattgatgcggcgtgtgttggggaatctgggtctaagatcaatattccttcttgggcaattcctgtgcaaatcaaggcggtcggtcacggttctcggcaacgatgtggaacggataaatatggctttcccgttcggcatgcaccgaaggccaaatctttcatggggtatcaaaccggggacattgtgcaggcgaacatcccgtaa

SEQ ID NO: 1135 - DNA, 254 bp, Unknown
  Ga0172375_10015289 JGI
gtcaaccaccccacggctgaagccgggggcttgagagatcaggcctgaggttgaccagccacagccagggccgcaaggccatcgggctacgttagtcaggtcatgacaccccgggatgcgtgccagttccaggctctgtcggccagcattaaacaggcatacggggttgaagccggtgtgttggccacaaaaagcttgattaaccttggcgaggcaaacattaccctggaaacaggaggctcattgtgagcaag

SEQ ID NO: 1136 - DNA, 1461 bp, Unknown
  Ga0180732_1000856 JGI
atgaaagtttatgtaatttcaaaatcaggcaaaccattaatgccgacagaaagatttggaaaggtaagaagattattaaagtcggggaaagcaaaagtggttcaccgaaagccttttacgattcagcttctttacgagactactgaaattgtgcaaccattgattcttggggtggatacgggagcgaatgacattggagttgtagttacaaaagaagatggtgaacctgtatttttaggtgaattagaaacgaggacaatagaagttgctcaaaatatgaaggatagatgcgaacatagaagggcaagacgcagacatcgcagagaaaagcgaaagagaagagcaaaggcagcaggtacgatttttgaaaagaaaaaataccacattaacggctgtgaagaagcaataacttgcaaactcatcaagccgggaatggtacgatttgaaaatagaaagcgagcggataaatggcttactccaacttgtactcacttattacagacgcatattaattttatcaagaagatagcaaaaatactaccgattgctatagtcaattttgagtatgccaaatttgatttgcataagattaataatcccgatgtaaaaggtaaagattatcaaaatgggagaaagaaaggatatgtcaataccgctgaatacgtgctttgccgagataaacattcttgccagttatgcaaggtaaagagtgggaagatgcgcgttcaccatgttatttggcaaagtgagaatggaagcgatactcctgagaatttagtgacgttgtgtgaaaagtgccatgaaaaagttcacaacaatcagaaagcagacaagaaaataaaaggattatttgaaggaatcaagaaaaagtatgtccatgctaccattcttaattcggttttacctaagttgtttcaatggttaaaaagcacttttgaaaatgtcaataagacctatggatacgaaactaaagagaaacgttgggaatataatttgccaaaatctcatgtagttgatgcttatttaatagctattggtgataaccccccccatgatttgacgagttgtgaatcgttcttgttcaaacagttcagacgacataatagggcgaacataaaaagacaagaagaccgaaaatattacatcgggaagaagaaagtcgctgttaatcgtaataaaaggacaggacaaacctttgatagcttaaaggatttagtcacaaaatgtgcagaacatgagactgttctgaatctgttgactgtaaagccagcgactagaccgaagagaagcaccaagccttttgggatgggcgatgtcgttaaattcaggggagggattcatatagtcaagggatttacaggaaactacttgggatttgttgatgctgctgatggcaaatacaacaaaaacataaaagaagcggaattggttatcaaaaatcaaggaattgtttgtatttga

SEQ ID NO: 1137 - DNA, 257 bp, Unknown
  Ga0180732_1000856 JGI
tcatcatatagctcgtgacattagcattgaagctgttgatggtgcgttggagaaaggtttaatttctgttaaaaaatattaaaaagcattcagctttttataaaaatatttagcaacaaaggttagaccacaggctaaaaaaggagttgcaggtaagagcaccttgtgattttcccagtccaagtagctgttaatcctgtaactaagtcagggaaaccaacgaccgaaaggtcgctttacaggagtttttcatgaaa

SEQ ID NO: 1138 - DNA, 1326 bp, Human oral metagenome
atgtctatgagtttgacatatgttttagataagaatggacaacctttaatgccaactcaaagatgtggcaaagtctatagactactaaaatctggaaaagcaaaggttgttcaaagagaaccgtttactatcaaattattatatgaacctgaaactcatatagttcaagatttaactttaggagtagatactggttcaagtaaaattggtactgcagtagtagataatgatgcaaatgtttattatgcttctaaagttacaatcaggaatgatatttctaacaagatgagcagacgcagaatttatcgtagagctaggcgaactagaaaacttagatatagacctgtaagatttagtaatcgtaaaaactcaactaagaaagatagattttcaccgactatggtgagcaaaatcaattcgcatattagagaaattgagtttgtaaagtctattttacctgttaagacactagttattgaaactggtacatttgatccacatctactggagcacatagaagatggaattgcttttaacaaacattggggttatcaaaaaggatctaactatggttttgctaattctagagaagcttgcttaaatagagacaactacacttgtcaatgttgtggagctaaaaatactagactggaagttcatcatattatttatcgttccaaaggtggtagtgatgaattagttaatctaattacgctatgcgagaagtgtcataaacttcttcatgatggaaagttaaaagaatttgagtcaaaacttagtggtaaaagaaaaggtatattaaaacatgctactcaaatgaatagtattcgaattcaactattgagacactatccagaagctattgagacatttgggttcatgactaaagaaaacagacaatcgtccgatttagagaaatcgcatgtaaacgatgctattatcatctctacaggttgtattacaaagcctaagtataagacagaagtgtactacaagaagaaatgtatacctagaggtgactatgctgttacattgtacgctggacaaggaaaaaagaataagttaggcaaaactactaagccaagaaatacaagaccagtgtatggatttagaaagcatgataaagttgaatactgcaatactatatgctttttgaagtcattgaggtttgctggtaatggtccgcttatggacattgacggtaatattttgaagtttagagagcgatatggaaaagctgatacgacgtcagtaaagaacctcaagagaatatcagctagaaaaaattgcttgtgtacaaaagtgactttcttgtgcacatcatga

SEQ ID NO: 1139 - DNA, 339 bp, Human oral metagenome
atcaaattgccttgtatacatcagatggtgagcactcagtgctaaaggttaacagactaagctagtagaaatactagactacgatgattgagtgagatacatacacacctgtagttgccgcctcagactgctgctctgtggctaagtattaagtagagcaaaaagtacaaaaagagctcggtgtacttagcttaaaaacctctttcatcattgtcgagaggaagtcagattcttaacttggtaacagagttaagatatgcacaaaggtctattacaaatacctgcttacagcataaaatttgtgaagtccattagaaaggagtcatgtctatgagtttg

SEQ ID NO: 1140 - DNA, 1491 bp, Unknown
  Ga0307930_1006096 JGI
atgatttacattgtagacgcaaggaataagataggccatccgaccaagaagcatgatatggtaggtcggttaatccgaaacgaaagagcgaagattattaaaagattgaacaaggatgttatgatagttcaattattaacaaaggttttttctaaaagcgaaaccattgattgtgaatttaggataggtattgatcctggatatgcaaatattggatttgcagtatttaaaatccatggaaacattatcacaaaacttattaaaggagaggcatgtttacgaacaaaaaagatcaaagaaggacttgatgccaagaggatgtatcgccgtagtcgaaggtatcttgctcgaaagaatattaaaaagaaatatggaacaggtcgagctaagttcaaacatcctgcttggaaaaatcgaagtaaacacaaatttcagcctacgcatcttcatgtaattcaatcacatgagaatgtgttggcaaaattattaaaattaattccaatcgaacaagttaaaatccatttggaatataataactttgatattcataaaatgattaatcctaagatacaatctttttggtatcaaaaagggttacagtttggttttgaaaacgtgaaaagttatgtgaggaatcgagataattatcaatgtcagatttgcaaaaaggatgttggtagtatcagaaacgaggtccatcatatcaaatggaagagtactggtggctcagatcgtcctgaaaatttaatactgttgtgtgaagtctgccacaacaaggtccataaaaagggattaaattgtccagacaaatctatttcagtaaacggataccgtaatgctggagttttaaactcagttatgggaacaatatggagtaggtttgaaaatcaatgtccagttcaagacacctatggttatattacaagtggtgttcggaatcgagacaacattattaaatctcatgccagtgatgccagcgttattgcatttaatgatagcttgggaagtcaaaacattgaagattattcttggaaggattataattctaaattaaatatgaatcaattccccagacatactcgatcattcacattaagacataccgaccgtagatatacaattttaaattctaatttacctgggaaaaagaaaactgtagtggcttggaatcgcaaacgaagggcgggccaagatcctaagaagcaaagccttgccgagttgaaacaatctcttatgattgatggaacgcttaactcaacagttatagttgcaattccagggcaaaaggtaatgagaagtttgatcactgattacacgatccgaaaaggtgatgttgtcaatgtgggctcaatgattaaagtttgtaaaggtgtgcaaaacaaaggtacggttgttacttttgaaaatgatttaaacccaaagaaattagatacatttggaactaaaaaatgtcataaaataataaacaattgtggattggtgacttattaa

SEQ ID NO: 1141 - DNA, 265 bp, Unknown
  Ga0307930_1006096 JGI
aacctaaaggatttgggcttgcagttaatcgcaagctgatttaattcaggattgaacagacgtttaatcaaaggttcacttacggatgccactcccagtccgtagcaatggaggtaagcggagcattgcaagtcctcattgctgattagtaggtaacgaagatcagtattacttttgattaagtcgggggagacgaaccgaactattgaaccattcttagtttgcccgatcaatgggtttttattaagaggtaaaaatgatttac

SEQ ID NO: 1142 - DNA, 1587 bp, Unknown
  Ga0182741_1016627 JGI
gtgcttcctcagccccggaccctggaaaccgcgccagcagacacggctggggtagccacgaaacggggcgcggtagacggcatccgcccgacaactggtgtgcaacatggtcgaggggagaccacccgcgagggtggcggcacgcccgatcctgttccggcaggtcgggcagcaggtgcgggtgaccgcaccatcaccagtcgagtgttcgtgctcgaccgcaagggtcggccgttgatgccgactcatcccgcacgcgcacgcgagttgctgcgcaagggtcgggcgcgagtccaccgcctgaccccgttcacgatccgactggtggatgtggacgccaccgaccccggggtggttgtcgatggagtggagctcggcatcgatcctggaagcaagaccaccggcatggccttgttcgtcaccgacgcatccggtaaccggacggcagtgtccctgatcgaactggtccaccgaggactcgcgatcaagatgtccctgtccaagcgggcggcgctgcgccggggccgccggtcccggaacctgcgctaccgcgcacccaggttcgacaaccgcacccgcaagcccgccgacggcctggacgtgtggctgccaccgtccgtgcggcaccgggtggtcaccactgtggcctggctggaccgactggcacggctggctccgatcacccgggtgcatgtggagtcggcgcgcttcgacacccacctgctccacgagcccgaggtcagcggcgtcggctaccagcagggcaccctggcgggcactgaggcacgtgagtatctgctagcgaagtaccagcaccggtgtgtctactgtgacgccaccggggtggtgctgaacctcgatcacgtccgcccgcgctcgcgtggcggcagcaaccgggtctccaacctggtgaccgcgtgcgtgccctgtaacgaggccaaggacaacctgccggtggagcagttcctggcccatgacccagcccgactggcgcgggtgctggctgggttgaagaagccgttgcgtgacgccgcagccatgaactccactcggcacgccctggtcggtgccatcgcctcacgcgggttcgatcccgtcactgccaccggtggtcgcaccaagtggaaccgcacccggttcggcgtccccaagacccatgcgctggacgccctgtgcgtgggtgaggtcgggggagtgtccggatggccgagcaccaccctggcggtgacagcaaccgggcgcggctcctacgcccgcacccgcagcgaccggcacggctttcctcggctgcgactgactcgggtcaagcgtcaccacgggttcgccaccggagacctcgtgcgggcagtcgtgcccaccggtaagaaggcgggcacccacttcggcagggtcgccgtccgcgccaccggcagtttcaacatcaccacctccgctggcaccgtccagggcatccaccaccgtcacgtccggctgctgcaacgagcagacggctacacctacgcaaccatgaaggagggagtcgggacgaggggcagcgcctatccctccccacggctaaagccgggggtatcccggcgcacccgatga

SEQ ID NO: 1143 - DNA, 301 bp, Unknown
  Ga0182741_1016627 JGI
gtcagacaccccacggctgatgccgggggcttgaagccctcagcatcagcagtctgaccagaccgagacaccttgaaggaggtgactacgttgcacacgagcgaacagacccactccggggtgcttcctcagccccggaccctggaaaccgcgccagcagacacggctggggtagccacgaaacggggcgcggtagacggcatccgcccgacaactggtgtgcaacatggtcgaggggagaccacccgcgagggtggcggcacgcccgatcctgttccggcaggtcgggcagcaggtgcgg

SEQ ID NO: 1144 - DNA, 1311 bp, Unknown
  Ga0164242_10000581 JGI
atgagtgttttcgttttggataagaagggtagggcactgatgccgtgcagtgaaaagcgcgcacggctcctcctgacccggaggaaagcgtttgtcaaagtgatgcagccgtttactattcagttgaaagaacggctgttggaggactcggagctacaatccgtcgagcttaagctcgatcccggttccagacataccgggatggcgctggtgagagacgcggaaggtatcaagtattgcttgaatttgtatcaactggatcattgcggtcagatgattcaccggaagctattgaggcgagcaatgtatcgaaaacagcgccgttcacgcaagacgcggtatcgacaagcacgctttctcaatcgccggaaacccaaagggtggcttgcgcccagcctgatgcatcgggtgaatagcacactgagctgggcgttgaaattccaacgctgggtaccgctcacgaagctcgtcgttgagcgcaatcgctttgatattcagaagctccagcgcccggagatcaaggggatcgaataccaacggggtacactctttggcatggaggtctgggaatacttactggaaaagtgggggcatcgctgtgtgtactgcgaggctcctgaccgtaaattgacgattgatcatgttacccctcgctcacgcggaggcagcgatcgcgtgagtaaccttgtaccggcctgcgagtactgtaaccagtttaagggcaataagcccgttcaagaattcctgaaaaggcatccggatcgcttgaagcgcattctggaagggcttaagcaatcgctaaaagacgccgctgctgtaaattcaacaaggtacaagctcattgaggttttcgaacaactgaagcttccaattgaaaccgacactggagccatgactaagtggaatcggcgtcggttaaatgtgccaaaaacccactcacttgatgcgctttgcgttggagatgtgcgatccgtttctgattggattggcaagcccactcaggtcattgcatgctacggtcgcggtagatatcaacgcgtcatcttagataggttcgggttccctaaggctaatctaacgcgcatcaaacgtccgtacggattcggaactggagacatagcccaagttttttcagaggcacatgtgaaacgtcagttccctttccagatctccaagatgcatagattgacagttaaaatagatggattcttccaactggcgcggcgtaaaaagatagtgaagctatcctaccgctatcttaaaatgaagcagcgcaataacggctatttcattacgctgcaacgtttctaa

SEQ ID NO: 1145 - DNA, 268 bp, Unknown
  SL_8KL_010_SEDDRAFT_10003558 JGI
tcaatgaagcgtctttcactgacaaactacacacctaggtttccgaacctagcttcaccaggaaaccagactcagcgtgaccgcggtcacgctacgatacccgtgaaattaggtacccctgcgtgcctcctcagcgttgggctctacgggtgtatgttaaacaggcctacaggtttaagccagtgcatacatcgttaaaccacgggatatctttgtcgagaggacctttacaggatccgtaaggattcatggagaaagaaccatgagt

SEQ ID NO: 1146 - DNA, 870 bp, Unknown
  Ga0209697_10006283 JGI
atgaaaatatcaagagataagcaacaggttgcagacaaaccagagcagaaaaccgctgtggtattcgtccgcaatatgtggggcaaagcaatcaaccccaccaagcctggcaaagcttatcgtcttgtaagagacggtaaagcagtgccggtttgtgcaaagccatacacgatccagatgcttggacactgcggaggatctgttcagccgtacagactcggactggacagtggttacagtaatgttggggcttcggttatcaacgaacggactggagttgaagtcctttcaatggaaattgaacttcaaaaagggcaaaaagatcgtaacaccgatcgcaaaactcgccgtcacggcagaagaaacaagaagtgccgacatcgggcagctcggtttgataaccggagaagggccaaaggcaaactggctccgagcattcagcataagctggacactcatgtcagaatagccaccgcccttatcaatgaaaagttcgtgcctatcagccgggctgttgtagaaggggctcagttcgatattcagaagatcaaaaatcctaatatcgaaggtgttgactatcagcaaggtgaccaagctggcttttggaatctccgtgaatatgtttttcacagagatgagcacaaatgccaaaatcctgattgtaaacacaaaaaggagaagaaccttcccctacaagtgcatcaccttggcttctggaaaggtgatagtactgaccgtcccggtaatctgatcacgttgtgtgttcattgccataggcctcagaaccatgcaaagaaaggatttttatacggatgggaaccaaaacttaaaaacttccgtcctgaaaccttcatgagcaccatctactag

SEQ ID NO: 1147 - DNA, 419 bp, Unknown
  Ga0209697_10006283 JGI
cccgcatgaaaccgcggcttgaggtgggggcttgttacgagcagtacggtatttcgtagcaagctcggttgattagcctcagtagcgtgtcgtgatgacattgctactacgttttctgagaatctcttccagcagcatcggaagagtgtaataggcaccttgggatcctccacacgtcccaggcactggagaaacaacgaatctgttgcaatccggttggttgtcaaatgacagctacttgcggtttagtgattaaacatcgctttttgggaatggcgaagtgttgctaacaaaaacctcagaaaaacattggcgaagtggaccaatggatgccttcgggcatccacacgaggcttacgagtcctcgttaaaaatcaaaagaaagggccgtctatatgaaaatatcaagagataagcaa

SEQ ID NO: 1148 - DNA, 354 bp, Unknown
  Ga0137371_10000193 JGI
atgccatgtcaaccacgcaaagcacgccttttactgaaagggggcaaggccaaagtggtgaagatggtgagaaggaacaatcgacaactacacaaagcgaccatcagaaagggtggcaagaggcagcgtaacactgcacccaagtatgtgcatggttttcgcttgtttgattgtgtgaagcatcaaggacagacctgctttgtgtttgggaggaggagttctggttacttcgatctacgtacccttgatggtgccaaagtccatgccagtgccagttacaaaaagttggctgttgtccagaaggcttcggccttgttagtagaaaggagggcggcgtttcctcctgtctcgtaa

SEQ ID NO: 1149 - DNA, 232 bp, Unknown
  Ga0137371_10000193 JGI
gtcaagaacccaatccccatgatcggggacgggcttgcagaagtcctgcttgactagcctgagtgcaaactacgttgggtgagtcatgatacctatggatgcttactctagtctgtagctctatcgtttacggttaaaagttctgaggggaggaacggtgctgtaagtgtaaaaagctcatccaacattggcgaagagtacctgactccgaaaggaggtaaacgctttgttc

SEQ ID NO: 1150 - DNA, 1536 bp, Human gut metagenome
atgtatgtagtctatgtattagatgaagaaggcaaaccgcttatgccgacaaaacgcttcggcaaagtcagacggatgctcagggacaaacttgcaaaagttgtatcagtaaagcctttcgtaatccagcttctatataagccaaaaacacatatcacccaaccgttacacggcggcacagatcccggtcgtaaaaacatcggcatgtctgtaatcaatgacaaaggagaaatcctctactcctctaccactgaatcaaggaaccaagaaatcccgaaacttatggcagaaagaaaagctcaccgtcaagcatcacgcagaggcgaacgtctccgcagaaaacgccgggcgaaaaaatataaaacaacaacaactttcccggaaggcagaaaactgctgggttatgaaaacggagtccttgctctgaaagatatcatcaatactcaggctcgttttaataacaggaagcgtcccgagaattggataacgcctacagtaagacaatgcattcaaacacatatcagccttgtcaggcagatatgcagattcttgccggtaacagactggagtatagaacataacaaattcgcttttatgaaaatggaagacggtactgtaaaaggtacagactaccagaatggcagactaaaaacctataaaaatgtgaatgactatatctggcatctgcagaacggaaaatgcgcaatctgcgacagcaaaatagaacactatcatcacatcgtacaaagaacaaaaggtggcagtaaccgccccgacaatataatcggactctgtgaatcctgccacgctaaagtacatagtggagaaactagtctcaaagaaatcggcgaaaagaaaaaatacgcccatctttccgtgctgaatcaagcaataccgttcatctgctccgagctggaacagctctttggtgaagataatttatatacctgcagcggttatgagacttatacatatagagaaatgtataagctggacaaaacccatgatatagatgcagcctgcatagctgctataccgcacaacatagaaacaccgatacaaaaagtcaagacctataaaatcaagcagtaccgtaaccataacaggcagataatccattgccagaaagagcgtacctacaaactcggcaaggaaaaaatagccaagaacaggaaaagacgtacagaccaaaaagaattgtctttcaacgaatggtataagatacaaaagaagaactgcagcaaaacagagcttgcagaaatcatgaaaaagctaacagttataaaaagcatccgcgcttacaacaacatgaaaagattaaagcccggcagtgtttttatatatgcaaagcctgaaaccaaaaaagctgaaaagccagagcaaaagcataagcaagcaatcaatcacagcgggaaatacattttaagaggtgctattaccaatggaaaatactacaaagccgaagactataataaaaacaatttctcggcaaaaaactgcagatttcaatacttcaagtctctgctctacatctaa

SEQ ID NO: 1151 - DNA, 209 bp, Human gut metagenome
gtcaattacacccacctaaagaggtgggtgcctgcaagcttgcttgcaggcaaaaaaggtaattgagcagagacatgatgcagcgctcactacggggtaatgccaagccccgtaccctggttacagctgcacctagtctatggcactcttacattcccttcttagggaatgaattatcttatttttaaggagaaccaaaaatgtatgta

SEQ ID NO: 1152 - DNA, 1698 bp, Unknown
  Ga0079226_10027342 JGI
ttgcatacaggcgaacagaccgaccttggggtgcttcctcagctccaagctctcgaacccgcgtcagcagacacggctggggtagcttcgaaacggggcgcgggagacggcgggcgtgcccgctcgacaaccggtgtgcaacatggtcgaggggagaccgggcgcaaagccggcgtggcaccttcgggtgcggcccgtgagggcaacccgaccaccggggttgcggtggtgttcgtggtggacaagcaccacaagccgttgcagccgaccaccgagcggcgggcacggaagttgttgaaggcgggccgggcggtggtgcaccgccggtacccgtttgtgatcagggtcaaggaccgcacggtgggcggctcctgtgtcgacggtgtacaggtcgggatcgaccccggctcccgccacaccggcatagccgtattcaccgagaaggccactagtaaaggagtggtgcggaccgggttgtggctgggcgagttggatcaccggggccagcgaatcagccgaaacctgtcatcgcgggcggcgctgcgccggggccgacgcagccgcaacctgcgataccgcaagccgaggttcctgaaccgtcatccggccccgtgtgactcgtgcggagccaacgctcaaagtggcaagcgactgtgccgaccgtgccagaaccttccccgtgccgagcgtgaacgtggggcgcgcccggcacggctggccccgtcgctgcggcaccgggtggacactctcgcctcctgggcgaacaggttgcagcggtgggcgcctgtcaccggctggcatcaggaattggtccggttcgatctgcatgcgatgcagcgcccgggcatcaccagtgtcgagtaccagcagggcaccctggccggcttcgaggtccgcgagtacttgctgtccaagtggaaccacaagtgcgcctactgcggcgcgtccggagtcggccccggctcggtgccgctgaacatcgaccacattcacccgggcagcaagggcggctccaaccggatctccaacctggccctggcgtgcgtggcctgcaaccaggccaagagcaacatgccggtggaggacttcctggttggcaagccggccgtgctcgctcgggtactggcgcaggcgaaggcgccgctggccgacgcagcggcggtgaacaccacccggtgggccgtgtttcacatgttggcggacaccgggcttccggttaccgccgcctccggcgggcgcaccaagtacaaccgcacggtcacgggcaccccgaaagcgcacgcgctggacgcgttatgcgtcggcgttctcgaccgggtgaagtcgtatccgtccacgaccatggtgatcggctgcgccggacgcggcacctatgcccgcacccggtcggacaaacacggcttccaacgcctgcacctgacccgcaccaaacggcactacgggttccagacgggagacctggtcaccgcagccgtacccaccggcgccaaggccgggatccatatcggcacggttgccgttcgagcacgcggaatgttcaacatcaccaccgccgccggaaccatccgcgacatccatcaccgacacgtccgcctgatccagcgggcggacggatacacctaccactcgacatcgacaccacgcgtccggctcctctccaccgcgaacgacagagtacccgccggacagaagaaatga

SEQ ID NO: 1153 - DNA, 295 bp, Unknown
  Ga0079226_10027342 JGI
gtcacttaccccgtcgtgaagggcgggggttgtagccccgttcggcaggactgagtgaccagactgagaaaccctttgaagggagggaatctacgttgcatacaggcgaacagaccgaccttggggtgcttcctcagctccaagctctcgaacccgcgtcagcagacacggctggggtagcttcgaaacggggcgcgggagacggcgggcgtgcccgctcgacaaccggtgtgcaacatggtcgaggggagaccgggcgcaaagccggcgtggcaccttcgggtgcggcccgtga

SEQ ID NO: 1154 - DNA, 1164 bp, Unknown
  Ga0315295_10106663 JGI
atggctacgaccaccacacgtcagaagacccaccagtccgtgcttcctcagcgggctgctctggaatccctgtcagcagacaccgttggagtaacgacgaaacggggcagggaggctcacgtcacgggaaaccgtggcgtggcagcgggtagtgatcatggtcgaggggagaccgtacgcgacgatcgccgtcgcgtacggcgtcacggacaaccgggtcacaccggaagttccgtcaccggtgggggtgaccccaccaccacaacaactgaatcaacaactgaacaggttcgtttcaccgcgggaaaggttttcgttctcgaccgccacggtgaaccgttgatgccgtgccacccggcgcgggcacgtcaacttctcgacaagggccgcgctcgcgtggcccggatgtatccgttcaccatccgtgtggtcgatcgcactgtcgccgacagtgaggtcgatggtgtggtggtgaaactcgatcccggcagcaaggcgaccgggatctcggtggctcgcgtcgatatcgacggcgggatcactggtctggtggcggtggaagttcgccaccgcgggcatcagatccaccagaaactggtggcccgcgccgcgttgcggcgtggccggcggacacgtaactgccgtcatcgggcaccgcggtttctcaaccgtgcacgtccgaaagggcggctggcgccgtcgctgcagcatcgggtggacaacgtcaccggctgggttgaccggtttcgccggctggcaccggtcaccggtatcgcaatggaactggtgcgtttcgacacccagctactggagaacccgaacatcagtggtgtggagtatcagcagggcaccttggcgggtttcgaggtcaaggagtacctgctggagaagtgggggcgcaagtgcgcctactgcgacatcaccggggtggcactcaacgtcgaccacatccacccgcggtcacggggtggaagtcaccggatctccaacctcaccctgtcgtgtgttccctgcaaccaggacaaagacaaccagcccgtcgagcagttcgtcaccgatcccgcacggttggcgcgcatcctggcagccgccaaacggccgctgcgtgacgccgcggcggtcaacaccacccgctgggcactgtggcgaaaactggctgccacc

SEQ ID NO: 1155 - DNA, 315 bp, Unknown
  Ga0315295_10106663 JGI
gtcaaccactccgccctgaaggacggagcttgtgggggcttgttcccgacaagttcctgacatccgggatcggttgaccagaccaagccatcactgaaaggaggcgatcaccaagatggctacgaccaccacacgtcagaagacccaccagtccgtgcttcctcagcgggctgctctggaatccctgtcagcagacaccgttggagtaacgacgaaacggggcagggaggctcacgtcacgggaaaccgtggcgtggcagcgggtagtgatcatggtcgaggggagaccgtacgcgacgatcgccgtcgcgtacg

SEQ ID NO: 1156 - DNA, 1380 bp, Unknown
  Ga0265297_10033497 JGI
atgtatttcatagtagatggaagaaacaatcttcagcatccaacgaagaaacatgacatgattattcgctggatctcaacaggaaaagctaaattcattggaagagatatagttcaagtatttaagaaattcgacagatctaaaactatcgactgtagatttatcataggtctagatcctggatacaaaaacatcggttatagtgtttttaaaatttataagaatcagatccagaatattctgaatggtgaagtactaactagaacttctgagattactaagttaatctcagaaagaagaatgtatcgtagaagtaggagaagcaaacaccgagagaatattctgagaaaatttggaagagcaaaatttaaagctcctagatggaagaacaggaagaagaaaccatgggctcctactcacatgcatctgtttcaaagtcatctaaatcttcttcagtgcatcttcaataggatagattataatcaatcagagatagtattagaacattttaaattcgattctcaaaaagctttagattcaactgtctctagctggaagtatcagaaaggtcctcaatttggattcgaaaatgttaaagcatacgttagagctagagataattataaatgtcagatatgtggtgagaaattattaagtcttagcgtccatcacatccaagagagagctgatggtggaagtgatagacccgagaatttagttactctgtgtcaaagttgtcatttactccttcatcaaactctagctgaatgtccaagaccctctaaagcttctccaatgagagatagtggagtattgaacagttgtatgaactacttagttaattatatttctccagcttatactatcactggatctgacactgccgctctgagacactactataacattgagaaatcacacgttaacgatgctaaagtgatagctttatctaaattagatctagaaaatttcaattgtcaagacttatccaatactgtcaatcttaaacagtttcgtcgtcacacgagaaactgtgttcagagatacgaagatagaaaatacatctgtgacggatttacagttgcttggaatagaaaatctagatctacacaggctgagtcgaagccatctttacaagagtttaaacaagaatatccagaagaaaaagtagtagctaaacctggtagaataatctactttagaactaattctcaagctaagtttagacctggagacatctttaaacatcagaacattaattatgttctcaagcagtgggcttctactcaaggaactgtaacatctgaaactgaaattaaatttaaaatcagaaattgtcgcaaaattagaaacaattcaggattagtaaccacccgctaa

SEQ ID NO: 1157 - DNA, 282 bp, Unknown
  Ga0265297_10033497 JGI
gtcaactaccacccgctaaagcaggtggcttgaaagagccaacgtagctttagttgttggggttgaacaggcactgggtgtggaaacacacccaaggatctgatctagtgttcaccatggggtgccactcccagctccatgcaactggaggtaacagatagtaatatcttaagtcctcattgctgtcatagtaggtaacgaagacagtattacactagaccaagccgagggagactaaagacaggacctgatctataggtcactaactaggagaaacagatg

SEQ ID NO: 1158 - DNA, 984 bp, Unknown
  Ga0256842_1000027 JGI
atggtttttgtattaagcaagaataaaactcctttagccccaactagcgaggctaaagctagaattttactaaaaaaaggaaaagctattgttcacaaagtttatccttttacaataagattaaaagagaataaagagtgtaaaaaaatttttgaaataaaatttgatgtaggtgcatcagttacaggagtagctatagtagatgcagttaaatgttttttctttgcagagatagtgcatagaggagcagtaattaaaaaagcaatggactcaaggagagcaataagaagaagtagaagaaatagaaaaactagatacagagagccaagatttgataatagaactagacctgaagggtggttacccccaagtgtgaaatcaagagcagacaatgtaataaattttgcaaaaaaatacgctaaattaatacctattttctccgtagctgtagagaaggatttatcacatctaaagcctaaaaaaacaccaaaacaggcatcaattgttcaaagtgctagaacttatactataaaagagttaagtagaaactttgatgtaatagtaggagaggggtgggaaacttacgcaaatagaaaagagcttggtttaccaaaacaacactactatgatgctatgtgtattggaaaagaatataaatatgaaatagtaacagataaagttttagagattaaagcacaaggaagaggaagccgacagatgtgtcgaatggatagatttggatttcctagaactaaagctaaaagctctaaaatagtaaaaggtttccaaacaggtgacattatgaaagcaatagtaagcaaagggaaaaagataggaacttaccttggaaaagtggctgtaagagctagtgggaattttaacattactaccacaaaaacgactattcaaggtattaattataaatactgtagaacaatacaaaaaggagacggatatgcatacgcaatatcgacaatcaaatag

SEQ ID NO: 1159 - DNA, 273 bp, Unknown
  Ga0256842_1000027 JGI
gtcaataacctctcccaatccttgacggatatggaagaggcttgattgaccagactgagttgctagaaatagctaactacgatatttatgttaccacaccttggagtgcttctccagctccaagctctgtgtaggctctttaagttgggttaaagccctgtgaacctagggacggtttgccatagcaaacaagcattaatatcattgtcgaggagagagtcaaaagaccgttaccactgcaaggtgagttaatttgaaaaaggattttaaatg

SEQ ID NO: 1160 - DNA, 1281 bp, Unknown
  Ga0209123_1000186 JGI
atgaacggagtatttgtcatcagtaatagcaaacagccgcttatgccgacctcgccggccagggcacggaagctcctatccggaggcaaggccgctgtgttccgaagttatccattcacgatcatcttaaaggatcgtgcaatcggggttattcaaccggtcagggtgaaaatcgatccggggtccaaggaaacaggcatcgccttggtcaacgaagtcacaatgaaagttgtcttcgttatggtattggttcaccgtggattggccatcagcacgatattagcatcccgtagggtactccggagtggccgcagaaaccgtaacaccagataccgcaagccgggattggcgaacacgacaaaacctgagggttggctggcgccatcgctattacaccgggttcatacgacgatgacctgggtcaggaggctttcttgcctagcgccggtcgctgcaatctctcaagagctggttaagtttgatctccaaaagcttgagaacccagatataagcggcatcgaatatcagcagggcacgctggctgggtatgaggttcgggaatatcttttggagaagtggcaccgcacctgctcctactgcgatgctaaggatatcccactccagattgagcacgtaaaagccaagaccaacggcggcaccaaccgtatcagcaacctgacattggcgtgcgaaccctgcaacacggcgaaaggaaaactctcaatcgaagtttttctggcaggtaaaccagatcgcctgaaaaagatcaaggggcagctaaggcaaccgctcaaggacgcaaccgcagtcaatgcaacgcgttggcgtttgttcgagtccctgaaattaacaggactgcctgttgagaccggatctggaggtagaactaaattcaaccggacgattcaaggatacggcaaagcacattggatcgacgcagcctgcgttggagtctcgggcgccagtgtcatcatcccttcgggcctccaccccctggtcgccaaggcttctggtcatggcaaccggcagatgtgtggcacagataagttcgggttccccatcaggcatcggactgcccagaagcaatttttcggttttcagactggcgatatggttacggccaacgtccctaaagggaagaaaattggaatacataccggccgtgtgctggttcgtgccaatggtaatttcgatattcaaaccggtacaggtcgtgttgccgggatcggccacagacactgcaccatggtccatcaaaaggatggctatgcatatcaataa

SEQ ID NO: 1161 - DNA, 284 bp, Unknown
  Ga0209123_1000186 JGI
gtcagataccccacggctgccgggggcttgaaaaagctctaatccgaccagccacagccaccaattcaacggatcggattgacggggctacgattaacggtcatgaccggaggatatgcattgccagtatcccgatggtcgctataaggaagaaacggcgaagggtaaaccgcgaacctgaccagcattgacaagctgttaatcattggcgaggcacacattactcccacaagggaagacggtccgtaaggaccaaacctatcaaaggatgtcggatgaacgga

SEQ ID NO: 1162 - DNA, 1950 bp, Unknown
  Ga0373956_0001933 JGI
atgtttgtccctgttgtagaccagaaccagcagcccatgatgccgacgacgcctgcccgcgcccggcgctggatcgccagcggaaaggcgaccgctttctggagaggcggtctcttctgcgtccggctcaatcaggaaccatcgtcgcgcgtcgtgcagccggtagcggtggggattgacccgggatcgaaacgggaaggctacagtgtcatctcggcggcacatacctatctcaatatccaggccaaagccagggtgggtgtcaaagaagcagaggagcaaagcacgcggatgcgccgaactcgccggaaccgcaagacgccttgcaggcagccacgtcccaaccgcaggcagagcaagaagacactgccgccatcgaccagggccaggtggcagtggaaactgcgggtggcccgttttctatgctcgctcttcccggtcagcatcatcgcggtggaggacgtggctgctgcaaccaggccgggcaaacggcgttggaatcgctcgttttcgccgctggaagtggggaagcactggttttacgaggagatccgcgcgcttgctcctctggaactcgtgcacagctacgaaaccaaagctgtgcgtgagcagttggggctcaagaagacgagcaagaagttggccgaggtctgggaagcgcattgcgttgatgcctggtgcctggcctaccgtgcggtcggtggcaacaccgccccggatcatcggggtgtggtcgtcttcgcgccactcatctggcatcgccgccaattgcatcgctttcaactggaaaaagggggcatgcgcaagccctatggcggaacactctcacaagggatcaaacgagggacgctagtccagcatccgaggtggggcaaggccctggtgggtggcacgatggatggcagactcagtctgcatgatccaggaacatacaagcgactgactcagggcgcgaaggtggcagagtgtcacgtcgtgacggtgttgcgatggagaacatgcttgcttccgctccatcccctccccaagaaaagacgtgcttcctccccggcttcaaaagcgcgggttctgggcaagtcgcgtttgatgagcgtaactctattgcgtgagggcgagcgagaggcaagcatgcagaagcttgctggcgcttcgtcgctctcgtttgctcataaacgcgtgtggacgtcaaaaactgcttcgcgtctgttcaccgtcctggcacctgtgctgctcggcatggtcctgctagggggctggtactttagcacgtccagaggactggttgccacctacgagctgccacctccatctgatgtctggacctctctgtcggttgggttcggctccggcctttttctgcatatggcctgggtgacgctgcaggagagcctgggtggctttctgctggcggttatgatcgccctgccggtgggcttcggtctggcgaaatggcgcctgttcgcagcgacgatctacccctacctggctgccggccaggctattcccgcaattgtgatcgcaccattcctggttgtctggatgggctatggcatgggacctaccgttgtgctctgcctcctggtggtgcttttccctatgatcatcactactgctctgggctttcagacgcttgatcaggcgctggtggatgcagcgcgcgtagagggggcctctttgtggccaatgctcaccaggatcgaattgcctctggccctgcctgcgatcatggcagctgtgcgcactggtctgactctatcagtagttggggcgctggtcggtgaatttgtgaccaacaccgatcagggactgggggccctggtgcagattgcgaagaaccagtatgatgtgccgctgatgttcgcgaccgtgctggtgctggcaatcatggcgggggtcttttacgggatcacctggggcctgaccaggatatctgagattctctctacctag

SEQ ID NO: 1163 - DNA, 239 bp, Unknown
  Ga0373956_0001933 JGI
gtcaagcaccccggcatgtcatgccggggcttgtgaagccttccgactcgccagcggaagacgagcaagcgaaagagcgagactagcttgtccaagctctggcaacggggcgattgaaggaagctgaatcacctgggcgtggcagcctccagaacgaacaggacgcctccctaatcttgttccacttcggtgatcagcagcgaagggattatcctacccgaaaggggcttatcgcacat

SEQ ID NO: 1164 - DNA, 732 bp, Unknown
  Ga0316622_100118550 JGI
atgctcgtgtacgtgcaggaccaggaagggaaaccgctcatgcccacccgccgctgcggggcggtgcgccgctggctgaagagcggccgggcccgcgtcgtgcggcgcgaaccgttcaccatccgattggtggaccgggcgggtgggtacacccagcacttgcaggccggcgtggacctgggcacagcgcacgtcggggtagccgtcgtgtccgcccaggaggaagtgttctccggcgagttccggctgcgcacggacgtgagcgggctgctcacggagcggcggcagttccggcgggcgcggcgtagccggaagtgccggcaccgccctccgcgcttccgcaatcgccgccgcagggacgaactcgccccctcggtgcgggcccaggtggcggagacactccgggtggtgcgactggtggagggcctcctgccggtggccgcctggacgtttgagatcggcaacttcgacccgcaccagttggtccatccggacgtgcggggggtgggctaccaacagggcgagcagtacggcttcgccaatgcccgggagtacgtcctgtggcgggaccgccacacctgccaggcgtgccgagggcagtcgggtgatccgcgcctgaccgtccaccacctgcggcagcgccaagagcgcgggagcaaccggccggccaacctcatcacgctctgccggacctgccaccaacggcaccaccagggaccgccgctccccttg

SEQ ID NO: 1165 - DNA, 291 bp, Unknown
  Ga0316622_100118550 JGI
gtcaaccaccacccgcttcagcgggtggcttgtggggaagcccacaagccacgggttgaccagccccagccagggggccacaaggccccaccgggctacgttcaggaggtcacgacacccggtcgtaaacgctccagcggccggcaactgtcgggtaaggtcaaaagccccgcgtggtaggggcggtgccttacccagggcaagcctcccgaacatcggcgaggagcaccacacggcccaacggccggcttaccccgcaaggggtagaaggaaccagcgatgctcgtgtac

SEQ ID NO: 1166 - DNA, 1287 bp, Oscillatoria sp. PCC 10802
atgaaggtttttgttttggatacaaatcgaagacctctcgatccgacgactcctcgtagggcaaggaagctgctcaagggaggaaaagcagctgtttttaggctgtatccctttactgtaattcttaaacgggctgttgacagtgagccagttcagccactcagactgaaaatagatccgggttccaaaaccaccggattggccattgttagcgaaaggaccggcgcagtcgtttgggcggcagaattgacgcatcggggttttcaaatccgtgaggcattaaatagccgcaaggtgaaacgacgcaaccggcgctaccgaaagactcgctatcgcgcacgaagattcaacaaccggcttcggaaagctggatggttgcccccaagccttaacagcagggttgagaatattgttgcctgggtgcgccggctgcggcgttttgcgccaatcagcgctatttctcaggagttagtcagatttgacacgcaagttatccaaaacccagagataagtggggttgaataccagcagggtgagttacaaggctgcgaggttcgtgaatacttgcttgagaaatgggggcggaagtgcgcttactgtggggccaaagagactcccctagaagtcgagcatatttatcccaggagtaaggggggaagcaattgtgtttctaacctcactttggcttgccacccgtgcaacgagaaaaagggaaaccgagatgtagcggattttctgtcgggcaaaccagacctactgcagcgcatcctctccgctgccaaagcgcctttgaaagatgccgctgctgttaactcaacgagatgggcgctgtatgaaggtttgaaaaatacaggattgccggttgaagcaggttcggggggactgaccaaatataaccgaaaacgccttggcttaccaaaaactcactggcttgacgccgcctgtgttggcgagtcaactcccgaaaatttggatgctagcaaaatcgaaaagccactgttaataaaagcgacagggagaggctgccggcagcgcgttaacccagacaaaaacgggtttcttatttcccataagtccagagctaaaacttatcagggatgggcaacgggtgatatcgcacgagctgacattccgaaggggaaatacaccggcatccacagagggcggattgcaatcggtcaagacggccagttcaaaatacaagtggcccacaagaagcgattcagcgtcaattacaagtatttaacgccaattcaaaaaggggatggctacggttatagcttctag

SEQ ID NO: 1167 - DNA, 328 bp, Oscillatoria sp. pcc 10802
gtctgacctaattcctgacaaaggaggtgggttggagcgcggcggacaatcgcgatccactaaaggcgtataaatcgtaaattcggtattattacgtcagccgaaaggacgggatcgccagtttcagcctgggttttagaacgaccgggctacgttggggaagtcatgacacccacaggtgcggtgccagcttgtggctctgtcgctcagcattaaaaggtgtagttagtggaagccagtgtgttgatcttaaaaagcttctccaaccttaacgaggcaaacattacccagcaatgggctgacctgtgagggtttaatttgcatgaag

SEQ ID NO: 1168 - DNA, 711 bp, Unknown
  Ga0101763_1138  JGI
ttgggcaatggagttgactcacatagggctacaaataaagactgcactcgaaaatcgtcgagctgttcgtcgcaatcggcgcaatcgaaaaacgcgatcgagaaacctcgattcaaaaatcgcaagcgccccgaagggtggttaccgatcagcctaatgcacagagtttttggagtcaaaacatgggcagatcgcctaactaggttagcccctgtaggttctgtcgttcaagagttggtaaggtttgacactcagaagatgcaaaacccggaattatcgggagtcgaatatcagcaaggagagttgtttaggtatgaagtgcgcgaatatctactagaaaagtgggggcgaaaatgcgcctactgtagtgtttctgacgttccaacaggaaccggagcacaaacaaaatttaatcggtgtcgtttaaatctgccgaaagaacattggattgacgcagcctgtataggtcaggttgatactgtaaagttagcaactacccaacccttgcttattaaatcaactgggtacggcagtcatcaggtcattcaaatcgacaaatacggctttcctcgtaagggctatcaagtcaagcttcctgtcaaggattggaagactggtgacattgttaatgtggttgctgataaaaatgctggattaagaggcgtcaggctaaaaactgttcgtgccaaaactcttgcggcatccggttaa

SEQ ID NO: 1169 - DNA, 182 bp, Unknown
  Ga0101763_1138  JGI
agctcacccgcaagggtaaacgttattccggtcatgacaccttggggtacgtggctagcgacaagctctgtcgggtgtcgttaaacaggcaaccgggtgcgctcattgccagtgcggcattcgcaaaaagccgtgtatccctcgcgaagccaacgtgttgagacgcaacaatgtctaattac

SEQ ID NO: 1170 - DNA, 1485 bp, uncultured Nitrospira sp.
gtgcagacaaggcacgggtggccacgaaacggccccgccagctacgcggggttgcaacatggtcgaggggagatgtgccgcgaggcacacgtcaccgccgaaaggcgtgaacaaaggagtaatccaattcaatcacaggtttttgtattgaaccaagaaggacagccactgatgccctgccaccccgccagggccaggcaactactcaaaaaaggacgggctgtcgtccatcgcgctgtacctttggtgacccgtcttaagaatcgcaccaaagccatcgtgcagccggtgcgccttaaagtcgatccgggcagcaaggctacaggcatggcgctggtgcgacaccagccctcagactctattaccgtgctgagcctttttgagttacagcaccgtggtcaccagatcagtgagtcattgacagcccgccgtcacatgcgtcgtcggcgcagaggcaacctgcgctaccgcgcaccccgcgttcttaatcgcgctcgctctgccggttggcttccacccagcctacagcaccgcatagataccacgctggcctgggtcaaacgccttcaacgctttgcccctattaagaacatcagttgcgaactggtacgcttcgacatgcaggcgatgcagaatccagaaattgacggcaccgcgtaccagcaaggcacgctgactggttacgaagtgcgtgagtatctgctcgaaacatttggcaggcagtgcgtctactgcgaggccaaagacaccccactacagattgagcatatccagcccaaggcactgggcggcaccaaccgaattagtaaccttgcgctggcgtgccggtcttgcaaccagaagaaggctgcgcaggcgatcgaaaccttccttgctgacaagcccgagataccgcgccatatacggaagcaggccgagcgcccactcaaggatgcggcggcggtaaactcaacgcgctgggcacttacccaggcgctgcgttcaaccggcctaccgctggagctggcctcgggtggccgcacgaagtacaaccgcgaacgccttaatgtgcccaagactcatgcccttgatgctgcgtgtattggcgagttccgtgtactgaaaggctggcggaggagcactttgcacctccgctgcacggggcgcggcaggtatcaacggaccagactcagcaaagacggctttccggttggctacttgatgcgccataaacgagtcaacggcttccaaacaggcgatctggtcgaggcccacgtgccctcaggcaagaaggcaggaacctaccaagggcgcatagcagtacgcgtctcgggcagcttcaacatcaggacagacgaagaagttattcaaggaatttcgtatcgatattgcaaactgattcagcgtggagatgggtacggatacattgtgagacctcaaatgacaagccacaaagcacagagtatgcggcctgctttgaatgccgcgctattccatccacaatga

SEQ ID NO: 1171 - DNA, 299 bp, uncultured Nitrospira sp.
gtcaaccgcccctcccctaaaggaaggagcttgcagaaaggattcccggtaagctcgaggttgaccagaccaagaatgggtacgtcccaatctacgttgcgactagagctaaagaaccgaccctgggatgcttcctcagtcccgggcaatcgaaggcggcggtgcagacaaggcacgggtggccacgaaacggccccgccagctacgcggggttgcaacatggtcgaggggagatgtgccgcgaggcacacgtcaccgccgaaaggcgtgaacaaaggagtaatccaattcaatcacag

SEQ ID NO: 1172 - DNA, 1392 bp, Unknown
  Ga0209639_1000561 JGI
atgcatgtatttgtattggatacgaacaaaaaaccattatcgccgtgtcatgcggcggtagcacgaaaacttcttaggcaggggagagctgcaatctataggcagtacccatttgcgataattctcagagaaattaaacaatgtgcagaacccacaaagttacgcatcaaaatcgatcccggttcaaagactacaggacttgtagtgctgtgggaaaggaataatacgggtatcgtaatatgggctgtagaactcaaacaccgtggtcatgccatcaagaaattattagataagcgtagggcgaatcggagaagtaggcgaaacagaaagactcgatatagagcttgtcggttccttaatcgagcgagggctgggggttggctcccaccttccttgcaaagtcgggtccaaaatacgctaacatgggttaaccggctttgtaggttggcacctattagtagttgctcaatggaacttattaagtttgatactcagcttatacaaagtcctgagatttccggtgttgagtatcagcaaggcgagttgcaaggctatgaggtcagggaatatctcttagagaagtttggccgaaaatgcgtgtattgcggggagacagacgtaccgctgcaagtagagcatgtcatcccaaagcatccagcggttggtccgatagggacgaatcgggtaagtaatctgacgttagcgtgtgaggtctgcaacaaagctaaaggaaatagtcagccgaacgattggctggaaaagctgcaacagtccacgatagctaaagacaagatacgggctggaaacttgcccaaggtcttgaagcaacttaagcaaccactcaaggatgcggcagcgattaatagtacgcgctgggcgctttatcgggtgttggagcagttaggacttccgttagaagttggttcaggcggccttactaaatttaaccgaacgcaacgtaatttaccgaaaacgcattggctagatgccgcttgtgttggaaaaagtacgccggaacagatcgtcttttctgatggtccaatcctggctatctctgctaccgggcatggaaaacggcaacgatgtgttacggataagtatggattccctattaaacatgctccaagggcgaagtcgttcatggggtttcagacaggtgacatagttaatgctgtaattcctaaaggcaaatataagggaatgcacacagggcgtgtagcgatccggttcagaccgagctttaaactgaatggatttgatgtgcatacgaagtatctaaggattattcacagagctgatggctacgcttatgagtttgctttgggggtgcaggtttcctccccacagatgaatctgggggctcccacctggcgcttgattggtggagattaa

SEQ ID NO: 1173 - DNA, 254 bp, Unknown
  Ga0209639_1000561 JGI
gtcaactaccccacggctaaagccggaggcttgtagggagaaatctttataagctcagttgaccagcctaagtcttgcaacaaagactacgttatcgaggtcatgacaccttggaatgcgtgccagttccaagctcctgtcgcttagcattaaacaggtgtactagggtcaagccagtgtgttaagcataacaagccttgataactttggcgaggcaaacattacctccgaaaggggagattgcagaaatgcat

SEQ ID NO: 1174 - DNA, 1260 bp, Unknown
  Ga0209347_1003246 JGI
atgttagtctacgttatcaacaagcacggtaaaccgttaatgccctgcaaaccaaagaaggcaaagaggctgctgcaagagggcagagcgaaggtcgtgaggcgcacgccctttacggtccaactgctttacgggtcgagcggttacagacaacgcgtcagggtcggagttgacacgggagccaagtacgtgggggttgccgctgttcgaacagacgagaaaggaagagcaaagaatactctgctgcaaggcgagtgtcatttgcgagcagatattcgcggcaagatggaccggcgcagggcctatcgcagagcaagacgtggccggaagacgaggtaccggaagccaagatttgataacaggcggcgatgggaaggatggttggcccccagcattcagtcacgggttgacggcacgctgaaggtaatggagttgcttcgccagttgctcccggttgcttcagtagaagtggagaccgcgcaatttgacacggcagcgatggcaagaggagtcttgcgactgaggccctggcagtaccaacggggcgagcagtaccagtttgaaaacgtcaaatcatacgttcgacatcgagatggatatcagtgtcgccagtgcaaggctaaaggtcgtccgttggcggttcaccacctacgacaaagagctgatggcggaacaaaccgtcccgctaacctgatcacgctatgtgaagagtgccacgatcgggtccatacgggcggaatcaagctgactgcggttcctggaagaacgaatctccggtatgccgcgcacacccaggcaggaaagacggcgcttatgacagccctacgggaacaactcccgacctctgagacgacaggcgccgtgaccaaagtcgatcgacttgagatgggactatcgaaaactcatgccaacgatgcgctggccatagcggctacaggggtacccgtcgaacccgtggacacccagttctttatgcgctgtgtcccaaagggaaactaccggctgttcaaaggtgctcgcagccatattcgcaatcaaagcgcccgcgagctatttggcttccggcgcctggacaaagtatgcttgcccggtggtcaagaagggttcgtcaaaggcaaacggtcctctggttacttcaatgtgagcacgcttgacggcactgtgatcagcgcgtcgatttcgtacaagagattgcgtttattagagaaacaaacatctctacttgttgagaggaggcaggccgtttcctccccggactga

SEQ ID NO: 1175 - DNA, 272 bp, Unknown
  Ga0209347_1003246 JGI
gtcaactaccccggactgaagtccgaggcttgcaggagcctctagttgaccagcctaagccttgagatagaggctacgttagcagtagagcttagacgccttacccggaatgtccggataggtgacctaccctggggtgccccctcagctccaggctctagaactccctggttaaacagtcctgagagggtagggacagtgccttggagatgcgctggctgctaacattggcgagagggacctaactccgagaggaggtagactctatgtta

SEQ ID NO: 1176 - DNA, 1479 bp, Streptomyces sp. SID12501
ttggctctggaattcgagtcagcagacaaccccgggatcagggacgaaacggggctcggacgccgtaaggcatccggtgtggaacatgtgcgaggggagatcaccggcagtgcacctactgccggtggcgtcaccccggaccatcaggtccgggagcccggccgtgaggccgaccccgccgtgttcgtcctggacaagcacggcacgccattacagcccaccagccccgccagggcccgcaagctcctggtatccggccgcgcggtcgtcgcccggcacacaccgttcgtgatccgtctgaaggaccgcaccgccgacgcctcggaggtcgacggtgtcgagctgggcatcgaccccggctccaagcacaccggcctggctgtgttcaccgcccgggacggtgagcgccggggccggttcgcggtccagctcgaccaccggggcgccgcgatccgcaagaagctggagcagcgatccgcctaccggcggggccggcgtacccgcaacctgcgctaccgcgcaccccgcttcctcaaccgaacccgcccgaagggctggctgccgccgtcgctccagcaccgtgtcgacaccaccatgtcgtggaccggccgcctcgcccgctgggcaccggtccgtacggtccacgtcgagcgcgtcgcattcgacacccacgccatcagtgccgggaagccgctggaaggagccgagtaccagcacggcaccctgcacggcacggaggtccgcgagtacctcctcgcgaagttcggccgcgcctgctcctactgcggcgcgacgggcgtgccgctgaacatcgaccacatccggccccgcagccgtggcgggtccgaccgggtctccaacctgaccctcgcgtgcatcccctgcaaccaggccaagggccaccggcccgtcgaggagttcgcccccaagcaggccgccgacatcctcaagcgcgcgaaggcccccctccgggacgccgccgccgtcaacgccacccggtgggccctgtggcgggccctggacgcacgactgcccacccggaccgccagtggcgggcgcacgaaatggaaccgcgtccggtgcgcactgcccaagacccacaccctcgacgccctggccgtcggtgacctcgacaccgtcaccgcatggccgcgcaccgtcctggtcgtcaaagccaccgggcgcggcacctacgcccgaacccgcgccgacaagcacggtttcccccgcctgcgcctgccccgcaccaaacagttcttcggctacgccaccggcgacctcgtccgggccgtcgtcccgtcgggaaagaacgcgggcacccacaccggccgcatcgccgtccgatcctccggcagcttcgcagtccgcaccgccggcggcctctacaccgcccggtacaagtacttccgtctgctccagcgcgccgacggctacgcctacaccacgcaacccgaaggcgggccgagtgatgcgccctga

SEQ ID NO: 1177 - DNA, 335 bp, Streptomyces sp. SID12501
gtaatgggatcccccgcctgaaggcggcgggggctttcagcccgaccggctgatggtccgctgttaccagcaccagccaactgatatggaggtgaccgaagttggctacgttccacgcaggacagaagacccacccatctgtgcttcctcagcagttggctctggaattcgagtcagcagacaaccccgggatcagggacgaaacggggctcggacgccgtaaggcatccggtgtggaacatgtgcgaggggagatcaccggcagtgcacctactgccggtggcgtcaccccggaccatcaggtccgggagcccggccgtgaggccgaccccgcc

SEQ ID NO: 1178 - DNA, 891 bp, Lachnospiraceae bacterium UBA2891
ctgatgccgacgaatgcgtaccgggcgcggaagcttttaaaaagcggacgcgccggaattgagtgttataaaccggtgttcacgatccggcttacagaccgggaggaaggagctgtacagcctgttgaatacacctgcgatacgggatatcagcatgtgggtatatctatcaaatctgaaaagcatgagttcgtgcacaatcagtacgatatgctcaaagacgagacggaacgccacaatgactgccgtaaataccgcagggtaagaagaaaccgcaaacggtatcgcaaacccagattcgacagccgttctaaaaagaacaaggacatggcgccttccctgcgtcaccgcatggagaaccagatccggctgttcgaatcgttctgcagggtgctgccgattacaacggccacatttgagatgggcaaatttgatacccagctcctgcaggcgatcgcggaagaaaagcctcttccaaagggaagggattaccagcatggttcgaaatacctgtaccagacagaacgtatggcagtatttggcagagatcactatacgtgccagatctgtgggcgttccgtcagagacggtgccattctgcacacccatcatatcgggttctggatgagcccaccgtaccggtcaggcaggatcagcaatctgctgaccgtctgtgagaaatgccatacggcatggaatcacaagcctggcggcaggctatggggtattaagcccaaattaacaaatttgacagcagcgacatatatgagcactgtcagatgggcgatgtaccggaggctggtcaaaacacatccggatgtggatatccatatccagtacggtgcaaagaccggtatcaccaggcaggaacgtcatatcgccaaaacacat

SEQ ID NO: 1179 - DNA, 342 bp, Lachnospiraceae bacterium UBA2891
  MISC_FEATURE (283)..(337): Any "N" represents any nucleotide
gtcaactacccgcgactaaagtcgcaggcttgtaaaaccgtcaggttttgacgattgtacaggcttggttgattagcctgagtgcttcgtgcactacgttactgtgagccgcgtccggatactccacaagtccggaccaactgggaactgtcgttaaaaactgctgagggaaggcagcgtgcggcagctgttttcaacccacggataacattggcgatgtggaccaccgtggctgcggagtaatccgtaagtacgagaatccgcaggtctctgcgactgcggnnnnnnnnnnnnnnnnnnnnnnnnnnnnnnnnnnnnnnnnnnnnnnnnnnnnnnnagtgt

SEQ ID NO: 1180 - DNA, 1002 bp, Metagenome
atggttccagtattggacaaaaacaggattccgttaatgccttgctccgaaaaaagagctaaaaagttaatggatagaggtgatgcaaggcccttttggtgtaaaggtgtcttctgtattattctacaacgtgagcctaaaagcaggcatatgcaagacattgccgttgctatcgatccgggcagtaaatttaatggctacactgttaaatcagaagctcatacgcttttgaacgtacaagctcatgccatcacagatgtcaaaaagaaaatggaagaacgagcaatgcttcgaagaggaagaagagggcgcaaaacaccttatagaaaatgcaggttcaacagatcggttaaagaaagacttgccccatcaacaaaagcaagatggcaacaacatttaaacatcgtaaagtggtttggtaaaatgtacaacattaaacatattgttgttgaagatattgctgccaaaacactaaagggcgcaaagaaatggaataaaacctttagccctttacaagttggaaaaaaatggttttatgataccgtagagtctttaggttatttgcttcataagtttaaaggatatcaaactgctcttatcagaaatagtttaggcttaaaaaagaactcaaaaaaagataaaaaatgtttttatggtcactgtgtggatacgttttgtttggcaacacaagttataggcggcagcggtgtgcctgataatttatttgtaaagtttataaagccattaagatgttatagaagaaaattacatgaaatattaccaaagaaaaatgggttgagaagaaattatggcagcacgttgtcattgggcataaatagaggcacattagttgaacatataaagtatgggatatgtttaataggtggtacatctaagggcagattaagcctacatgatttggcaacgaataaacggctttgccaaaatgctaaaaaagaagatattaaaattctaactcaaatgagatggaatatttattaa

SEQ ID NO: 1181 - DNA, 250 bp, Metagenome
atcaactacccacccactaaagatggggtgggtttgaaggaaaaccttaacgaggactaacttcaaattaaacgggagattagactggacaagatcacggaagtggtcgcttgaagtcaactaaagggttatctgcacagagaggcaaagattatcttatgaggtgtttccctagcctataagctctaatcaccctgagtgtcgaagggaatagttataaagtgcgtaagcacataaaaaaaaaacgtta

SEQ ID NO: 1182 - DNA, 1536 bp, Unknown
  Ga0257069_1000440 JGI
ttgaaacacaaacaaaaagagcgcgtcaacatcgtctacgttgttgacaaaaacggcaggccgctcatgccgacaaaacacttcggcaaagtcaagcatatgctacgggatgggcgtgcaacgatatatctgcatcgcccgttcacgattcggctatgctacgaaacgccggggaaaacacaatctgtcgttatcggagttgatcctgggcggacgaatattggccttgtttctgtatcgcagaaaggggaggttctttacgctgccaaggtcgagacaaggaacaaagatgtgtcgaaactcatcgccgaacgcgcggtacatcgtagagcttcacgcataggtgagcggcagcgtcgtaagcgtcgcgcgagaaagcatggcacgacaaccaagttccccaatggtagaaaactccccggttacaaagatggcgtgcttgaactgaaggatattatcaatcaagaggcgcggttcaacaatcgtaaacgcgcagctaagtggttggcgccaactgcaaggcacttgcttcagacccatcagaatcttttgttacatgtccgtcggtttcttccgataacagcagttgccattgaacataacaagtttgcattcatgcttcttgaggatgggaccgttcgcggcgctgatttccagaacggacggctcaaggggtacgagtctgttgcggtttatgttcgtgctcgtcaaaatgacaagtgcgagatttgcggagcaccaatcgaacacatccatcacatccaggcgaggagcgagaacgggagtaatctccccgaaaatctcgtcggcctttgctcgaaatgtcacgaagccgtgcatgttggaaagaaagaaatcaacatcaaaggctttgcgaagaagtacgcaagcacgtcggttttaaatcaagcattgccacattttcttttttggctggaaacggcctttggcgatggaaatgtccgaacttgtgcaggttgggagacgaaagttgagcgtaagcggttgggcttttcgaaagaccaccactatgatgcagtatctattatctcggcttgtggccatccggttgatttgaatctcgggggtggacggattttagtacatacccctcatctgattatgcagttccgacatcatgatcgccagattattcattgccaattcgagcgcacatataaagttgtaggagataacggaaagttgatttccgtggtaaaaaatcgaaagccccgtttcgagcaaccaaaatcaatgcctgcgctcaatgtgtggtacgatgacgaagtgaagcggagcgggcagcacaaggctcgtctggctctatctcagctcgttgtagtgaaaagcaatcgacgttacaagaaccccgctcgggttatgccaggaaccgtattccgctacgaagacgatttgtatgttatgcaaggcagcgtgtcgtacggtcagtatttttgcgcgatcggtcaagggaaaaggatgttctcttctaaaaaatgcgaagttttgtgccgtcgaggacttatttatctgtaa

SEQ ID NO: 1183 - DNA, 279 bp, Unknown
  Ga0257069_1000440 JGI
gtcaacaactcctactttatgcctgttaacgtttgaggtaggagcttgcaggagaaaatctgcgagtcaccagaaaatatctgggggagttgagcagaggcatgacgcggcgggattaattccgaaacaccgagggtaataccaagcctctcgcactgtgggtagccgtgccgagcctatggtttgtacctgctttttgcttttgcagggattatgtacctaacggtacaaaggaggtgttttattttgaaacacaaacaaaaagagcgcgtcaacatc

SEQ ID NO: 1184 - DNA, 1263 bp, Human gut metagenome
atggtttatgttatttcaaagagggggaaacctctcatgccatgtacaaatgttattgcaagattgctgttaaaacaggacaaagcaaaggtaaaaagaagatgcccgtttatgattcagctgacttatgatgctacgcaatatatccaagattgtacgcttggtgtagacaccggaagcgctcatattggtgctgctgtagtagatgctgacaaacgtgttttgtacatgtctgaaacgaaaatcagaaatgatatcacacagaaaatggacagacgcagagcctatcgtaaagtaagacgatatcggaaaacgagataccgcaaaacaagatggatgaaccgtaaaaattccaaaagggaaaacaggttctctcctacaatggtgagtaaactacattcacatcagaaagagattgaatttgtaaaatctattttgcctattacgaggcttgtgattgagacaggtacatttgattgccatttaatgaaaaacccaatgttatacaatcaaaaatacaggcattggggttatcagcaaggacctgattatggttttgcaaataccaaggcaaaagtcttaaacagagacagttatacttgccaatgctgcagggggaaacggaaagattctaagcttgaagttcaccacattgtgtaccgctctaagggtggctctaacgaagaagataacctgattactctttgccatacctgccattctgcacttcatcatggaatgatgaaattaaaggtaaacggtaaacaaaaaggtaacttgcgatatgctactcaaatgaacagtatcagaacacagttgttaaagctttatccagaagctattgaaacatttggatatgtgacaaaagagaatttgcaactgtcaggtctgccgaaaacgcattgcaatgatgcggttatgattgccagtggaggaaatacggtgaatttcaaaacacatagcttatgcaggaaaaaatgtatccccaaaggggattatcagcaaacaaagggtatacgaagtgagcagccacttataacgaaaaagatatacggatttcgcaaatttgataaggtacaataccttggtaaagaatattttattaagggcaggatgtctactggatatactgtacttatggatattgatggaaacaaagtagatttttcgtatatgccgaaaggttataagacaccaaaattaaagaactgtaagagaattacggcaaggaacgggtggatgattcaggaaattgctatctga

SEQ ID NO: 1185 - DNA, 295 bp, Human gut metagenome
gtgaactacccatcccctaaagggaatgggcttccattaaatggttcaccagactcagcagccagaaatgactgctacgataattaggtcatgacaccctcggttgacgcatcagaccgttgctctatcgagtatgtttaagttgggttggtgtaagcaaagccctgtgatatattcgcaaaaagcctttttatcattgtcgagatgaagtcggaacaactgtatggtaacagtacggcatagtacgcaccacctgcttttaagcagagtatttatcggaggatttactcaatgg

SEQ ID NO: 1186 - DNA, 1305 bp, Unknown
  Ga0310136_005540 JGI
atgacattggcgaggccaactttacctccgaaaggagagattgcagagatgtatgtatttgtcgttgacgccgaaaggaaaccgcttgctccatgtcacccagcagtagcgaggaaactgctgaagcaggggcgtgcggcagtgctgaggaaatatccgttcactatcgtacttaaagagacgaaggaaactcatccgcaggacattaggcttaagattgactccggctcaaaagcaacgggaatgataatattacacaaaaacaaagtcatttgggcagcagaacttgaacaccggggacacaagataagggaaagattgctggagaggaggcagcttcgccgaagcaggagataccgcaaagaaaggtatcgcaagccgaggtttgacaaccgcaggagaccggaaggttggctcccgccgagccttgaaagcagggtcgccaacataataacctgggcaaaccggttaataaagctgtgttcaatctcagcaatatctcttgagcttgtcaagttcgacacccagaaattacagaacccggagataaccggtatcgagtaccagcggggcgagctttacggctacgaagtcagagaatacctgttggagaaatgggggaggaagtgtgcctactgcggcaggaacgacgtaccgttagagcttgaacatatagtgccaaaatcgaggggcggcaccgacagggtgtccaacctgacgctggcttgccacgactgcaaccagaagaaaggcaatctcacggcagaagaattcggttattcagaagtgcaaaaaaaggcaaaggtcccattgaaggatgttgccgcagtcaatgcaacacgctgggcgttatatggcagactgaaagaaactggtttgcctgtggagtgcgggacaggaggaatgacgaagtacaaccggagcaaactgggtttgccgaaggagcattggacagacgcagcctgtgtaggggccagtacgcctgaaaacctgcgggtgagcattaattctgtcttgcaggtcaaagcagttgggcatggcaggagacaaaggtgcataacagacaaatatggttttccgaaggcgtatgcaaacagacaaaaaacatatcagggttttgcgacgggagatattgtaagggcagtaataccaaaagggaaatatgcggggagccatattggcaggatagtcataagacacaggccgtcgttcgggctgaacggctttgacgtacacccgaagtatctgacgattcttcagcgaggcgatggttatgattacagccttttagcaatagagcgataa

SEQ ID NO: 1187 - DNA, 250 bp, Unknown
  Ga0310136_005540 JGI
gttgactgctaataactgcagttggaggcgtataagcctcagagtcaaccagcctcagccagggccgtaaggctatcgggctacgttatcctggtcacgacaccctggggtgcggggccagctccaggctctgtcgcccgctgttatgaggagctgacttggcaaggctcgaaggcagctggcatgaaaagccaggatgacattggcgaggccaactttacctccgaaaggagagattgcagagatgtat

SEQ ID NO: 1188 - DNA, 1551 bp, Unknown
  Ga0187878_1000231 JGI
atgaatacgcgagacagaagactaacacccaccaacgcctccctaattgctggatgggatgaagccgtacatcgcgagggtacggagttaaaagctgacacagcttctgctttttatctcgatggcgaagggacgtctaaaaattcgaaagaatcaaaggacattgctaggcttatacccaacaaagatcttaagattttggagaatagtagaataaataagaaaatcaaaatatcaaaaaagaataactatagagtaccggttttatatccagacggaaaaccaggaatgcctacatctaataagagagctaataaatggctaaaagaaggcaaagccgaaaaagtaagaaataaattgaatgtatttgctattaaattgaagttctggcctatctatagaaatttacaacagatagtattgttaatagatcctgggagtacattcacaggaatagctgtgatgtccaagaaatgtattttgatttcatatatgttagaacttccgggatataagaaaggttcgaaaccgttcactgttatcaatagacatagaaagaaaatagagaagtatcacaatactattgtagataggataacagatagaaggaggctaagaagatcaaggagacatagaaattgtagaagaagagatgaaagatggctaaatagaactaagaaaggtaagatagcaccatcgatgttagcaaagaaacaattagaattagaggcggttaatgaactgagtaaattgtatccgattacaatcataggatttgaagatgttgctttcaatcactggggagataaagatggtacaaagggtcaatacttttctcaagtagaaattggtaagaatttgctattagatagactgaaaaagatagctcttatccaaataataaaagggtatgagactgctagaagaagggaacaattgaaactgcctaaagaaggagataagacaaaaaggtcaataaaatctcatgtaactgactgcattgcaatgggttcaataattctgaatactaatcaatcttctagtaataaatttcatttcaatgtaatatcaaggcctaaatattctagaagagtcctatttgcagaacagcctaataaagatggtattacagaaagagctggaggtcatattcctcataccccaatattcaaaggattgagaaaaggagattatgttgaagcaaatgcgccaaatttaaagaagatatatagaggatggatatcaggatatactgatgacagaatctatatatctgatttcgattggaatcaatctccatctttttctgtagataatattagattattggatagaaatcacggattgataaatctgagattgggatggattaaagatactatagatatttgtcaatttggatctaaacaaattgatgcagaaaataagataataaatatgaaagtcataaataatattatagagatgaaaaagaaagctgaaaaggatgcaattaaagaatcaaacaaacaagataagacaatacagagaggaatagatgatgcttggtaa

SEQ ID NO: 1189 - DNA, 233 bp, Unknown
  Ga0187878_1000231 JGI
gtcaactactgcccccagcgatcagctttagctgagagcgactgccggcttgccggcactctgaagggggcagcttgtagctcagaatacaacgaaagaattgactagcctgtaggagaaatatctaatctatgaatacgcgagacagaagactaacacccaccaacgcctccctaattgctggatgggatgaagccgtacatcgcgagggtacggagttaaaagctgacaca

SEQ ID NO: 1190 - DNA, 1143 bp, Unknown
  Ga0268280_1010517 JGI
atgcagaagttacaagcaaagttaaagaacatacctacagatacttctctagtctgtagctctataaattctgtattaaacaaagaccaaagtcttagtgtacagaataaagtactgacttgtaacaattccgaagagaatcttcagaaacataaatctggttcagacttgagagttctgaatattgtttatgtacttaataagaggggtttagctcttatgccttcttgccaatccaaggcaagaaggctcttaaggttagggaaagctcaagtagtaaaaatgtatccttttactatacaattagctaatgctagtggagaagcaaaacaagagatagtattaggagtagatgtaggatataaacatgttgggatttcagctattagtcagaataaagaattatattcagcagaggtagtcctaagaacaaatatttccgaattattatctgagagaaaaatgtatagaaggaatagaagaaataaattatggtatagaaaacctagatttaataatagggaaaaaggtaaaggttggctatctccatctgtacaacataaaatagattctcatattagaataatagataatataaagaaattattaccaataacaaaaattattatagaaactgctaaatttgatattcaaaaaataaataatcctgaaatatgtaatatagaatatcagaatggagtacaaaaagatttttggaatgtaagagaatatgtattatatagagataatcacacttgtcaaaattgtaaaaagaataataaagtattaaatgtacatcatcttgaaactaggaaaactggtggtaatagacctgataatttaattacattatgtgttgaatgtcacaaaaagtatcatttagggaaaatcaaattagatataaagattaagaataattttagtagtgagacatgtatgtctataattaggaatagactaattgataaattaagattaaagtataatatagaagagacatatggatatataacaaagagtaaaagaatggagaataagatagaaaaaagtcatattaatgatgcttttatcatttctggaggtattaatcaatttagagttagtagttatttagtaactcagaagaggaagaataatagaggg

SEQ ID NO: 1191 - DNA, 288 bp, Unknown
  Ga0268280_1010517 JGI
gtcaactactccaggctaaagctacggagcttgcagagtaatctgcaacaagcaagtgcgtaagcacttgcaagagttgattaggaagcaaaaaggaaacaaatgcagaagttacaagcaaagttaaagaacatacctacagatacttctctagtctgtagctctataaattctgtattaaacaaagaccaaagtcttagtgtacagaataaagtactgacttgtaacaattccgaagagaatcttcagaaacataaatctggttcagacttgagagttctgaatatt

SEQ ID NO: 1192 - DNA, 1260 bp, Unknown
  Ga0326511_10041793 JGI
atggtttatgtgcaagacattaatgggaaggcactgatgccaacagagagacacggaaaggttagaaaacttctgcgtgacggcatggctgttgttgttatgcgtgaaccgttcacaattcgcctaacgtatgaaagcacctcatttatacaagaggtttcattgggaatagatgcaggaagccgtcatattggtgtgtcggctaccacagcagacagagaacttttctcggcacaggtggaattgcgtacaaatattcagaaattgctggcaaatcgtatggaactacgcaggacacgcaggagccgcaaaacccgctatcgcaaaccgatgtttgacaataggaggcatgataatggctggcttttcccaagtaccagacagaaggttgatacacatcttagggttatccgcatggtgatggatatactacccattagcaaaacgacaatcgaggttgcaaaattcgatgtccaaaagataaaaaacgatgcaatcgctgggattgaataccagcaaggcgagcaatttggtttttacaatgttagggagtatgttcttacacgcgatggttatcaatgccagcattgcaaaggaaagtcaaaagacccagttcttaatgttcaccacattgagagtagaaagataggaggtaatgcgccaaacaatcttgtaaccttgtgtaaaacatgtcataagaaatatcataagggggagattactctaagatttatgcgcggtgtgagttttcgtgacgcagcagcgatgaatgctatgcgatggtgcgtgtataactcggcaaaggatgagttccgtaatgtgcatctgacttatgggtatatcacaaagcatactcgaatcaggaacggaataaaaaaatcacatacggcagatgcaaggtgcatcagcgggcatccgttagcggtagcacaaacggatgtgtatatctttaaacagcgcaggcgacacaacagacagattcacaagtgtgcaattctaagtggaggatataggaaactcaaccaggctccgtatcttgttaaaggatacaggctattcgacaaagtttcctttaatgggcaggaggcttttattactggtagacggcagagtggttcttttgccataaagaccattgattggaagtctctttcagagggggtctctgccaagaaactttcttttctgaatatcagtagaggttttttaatttctaataaaaagagtttgacgaactataataaatcaacaaatgagtaa

SEQ ID NO: 1193 - DNA, 262 bp, Unknown
  Ga0326511_10041793 JGI
ctcctggctaaaaccaaagagttcgcttcggctgctcttaactgattagactaagtgtttagaacactacgttggttgagaatgtataggcactccgagatatatatcccagtttcggacactgcggacggcgattaaaagaccgaaaggagatgtggtcggtgttgtcgttacttgaaacctcttccaactttgtcgaggggtacaccacgggagtaatcccgacttacaacaaagttgtttaaaaaaagcaaaacaaatg

SEQ ID NO: 1194 - DNA, 438 bp, Unknown
  Ga0334886_1000752 JGI
atgctagtctatgttcttaacaggcacggaaaaccactgatgccgtgtaaaccacagaaagcacgaagactattgaaagaacagaaggctaaagtagtaaaaagaacaccctttactattcaactgttgtacggttcctctggatacaaacaagatgtaattctcggtgtagatgccggaagcaagacaataggagtatcggcctcaactgagaacaaggaagtgtttgacgaagtagaatatcagggagaaccatgcttcatatttggaagacggaatagcggatactttgacatcagaaagctcgacggaacgaaagtgcatgcttcagcaagctataagaaactaaagttgttaagtaaaacaacatccttactatgtgaaaggaggcaggcggtttcctccccacagctaaagcagggggtctccgccgattaa

SEQ ID NO: 1195 - DNA, 239 bp, Unknown
  Ga0334886_1000752 JGI
gtcaaataccccacggctaaagccgggggcttgtaaaagctctgtttgactagcctgagtgcttcgagcactacgttatcggcaaatgtataggcaccgtaggatgcgttcccaagtcttacgctctgcggttggtggttaaacagtcctgatgggtagggacagtgctgctaacgagaaactgtcgaataacattggcgatgggaagattactccgtaaggaggtggactatatgcta

SEQ ID NO: 1196 - DNA, 1245 bp, Human gut metagenome
atgccctgttcaccggcaaaagcgcggcttctgcttaaagagaagaaagctattgtgaagaggagaacgcctttcactattcagctgacgattgcaacgggtgagaccaaacagccggtgggtctgggcgttgatgccgggtacaaacatgtcggactgtccgcatcaacggacaaggctgaactttatgcatcccaagtcgaactgcgacaggacatcaccgatctgctctccgctcgtcgtgcgttacgacgggctcgcagaaaccgcaaaacgcgctaccgcgcgccaagattcaacaaccgcatccgcaccaagcgcaaaggctggcttgctccgtcggttgaaaaccgaatcaacgcgcatttatcgcgcatcgaaacggttcttcgaatgctgccggtcacgaagatcaccgtggaaacggcgtccttcgacatgcagctgctgaaggatcccgacatttcgggaaaagagtaccaagagggcgaacagctcggcttctggaacgtccgcgagtgtgttcttttcagagatgggcacgtttgtcagcattgtcacggcagattgaaagatccggtactcaatgttcatcacctgaaaagcagacgtaccggcggagattcgcccggcaacctgattacgctttgtgagacgtgccataaggcgcttcatcgcggcgaactcactctaaaggccaagcgcgggcaatcgttccgtgcggaagccttcatgggcattatgcgctgggaggtactgaaccgcctgaaggcgtcgcatcctgagctggaagtgaacaacacttacggctaccggactaagcacgcacggatctcgaacgacatcgccaagtcgcattgtgcagatgctttctgcgtcgccggcaatctcggcgccaaaaggctctgcgaattcttcttccagaagcagacgcgttggaacaaccggcagattcacaaactttccgtcctcaaacacggacttcgaaaacgcaatcaagttccctttgaggtcaatggcttccgtctttttgacaaggttgcctgcaagggagaagaaggcttcattttcggccgtcgatcatccgggtactttgatgttcgaaaacttgacggaacccgcatttcggcaggcatcagctacaagaagctgcatctgctggaaaagagacaaacttatataacagaaattcgaaaggagaaggcgcttcctcccctgcctgaaggcagaggtctccgcgcctaa

SEQ ID NO: 1197 - DNA, 247 bp, Unknown; identical to SEQ ID NO: 779
  human gut metagenome genome assembly, contig: NODE_64_length_112578_cov_13.342685, whole genome shotgun sequence WGS

SEQ ID NO: 1198 - DNA, 1014 bp, Unknown
  Ga0172375_10009941 JGI
atgtttattcctgtagtttctaaaaaaggtaaacctttaatgcctactactccttatagagctagaaagttaattaaggcggggaaggccattaaaaaatttaaaaaaggtttattttatattcttttaactgaaaggatgattggtaaaactcaggatattgctgttggtattgatccgggtattaaaaaagaagcttttacaataaaatctaatagccacacatatttgaatatccaaatagacgcaattaattgggttaaggataatgtaaaaacaagaagtctattaagaagaagtagacgacaaaggaaaacaccttatagaaaatgcagattaaatagaaaaaagtcaaaaaatcttcaaccttctataaaagctagatggcaatggaaattaagaattataaattttttagtttctatttttcctattacttattttatagttgaagatataaaagctaaatctaaaaaaaattgtaaaaaatggaatatgtctttttctccgttagaagatgggaaaaattatttttataccgaacttagaaaacaaggtaatgttgaattaaaaatggggtatgatactgctgaattaaggaataatttaaaacttgaaaaatcttataacaaaaattcaaataaattcgaggctcattgtattgattcttttgtattggctaattggtttgttggcgggcatttgacgcctgataataaaaatattttattaattaaacctatagaactccatagaagacaacttcacaggttacaaccaagtaaaaaggggataagaagaagatacggctccactaattctttaggatttaaaaggggtagtttagtaaaacatgttaaatatggattatgttatgttggtggttatttaaaaaataatataagtttgcataatatagaaaatggaaaaagaattactcaaaaagcagaattaaaagattgtatttgtttaaattttaacgcatggaaaatttcttatctattcaataaatag

SEQ ID NO: 1199 - DNA, 206 bp, Unknown
  Ga0172375_10009941 JGI
attcaactacccttccctttaattgttaagggcttaaaagactaacaataccatgttagaaatttaagttaaacaggagaatagagtggctaagatcataagtggtcgtttgaaagcagtaagcaaactgaaggtggtacttcaaaatatgttaaggatgttcccctagtctttatcctctatgtttgcctatctcgaaggggttg

SEQ ID NO: 1200 - DNA, 1272 bp, Human gut metagenome
atgaaacaagaccagaaatatgcttttgttcaggataatcgaggggtagttttaagccctactaagattgaaaaagcttggtatttaataaggcataataaagcaactttagtaaagacagagcctatggttattagattgaatagaaagcaaaataatacagatatgagtttcatgaaagtaggtttagatccaggtgatactacaggggtagccatagttcaggaaagtcatttgaatatgtctaaaaacaaagcagtttttaaggcaaatatacaacatcgtaatgatattaagtcattagtagagtcaagaagagagtatagacgattacatcgatacaataaacgttatagacaggctcgattcaataacagagcatcttctagaagaaaaggtaaagtagctcctagtattaaaaataaaaaagatgaaatcttgagagtgcttagatacctttcaaaatatgtatgtattgacggtatctatattgaagatgtaagttttgatattagagctttgacagatgagtataagccttacagatggcagtatcaaaagtcaaatcgtcttgatgaaaatatccgcaaagcagtaatacaaagagataagtgtaaatgtaaaatgtgtggagcaaaagatacacaattagaagtacatcatatcactccaaaacgtgaaggtggaaacaatactttgaagaatcttattactctttgtagtgaatgtcataaatcagtaacaggggtagaagatgattataaaagttatctatattcacttatagatggaaaacaaattcctttagctcctgcaatgcatgtaatgataggtaaaaattatttataccagcagttgagacagtttattggaggtgattcctatgtttatttaactacaggaggagatacagcaaatagtaggcttgattggaatattgagaaatctcatagtaatgatgcagcatgtataacagatgtgagatgtttaccagaaaatttaaagacttatgtttatactatcaagccacagcgtaaaaagaaaaagactaagcaaaatacaagtaatctagctataaggcatagagatttagtttggtatactccaaggggtagagaacctattaagtgttatgttacagctattatgcagacaggatgctgtgtaggtaagtataaattaaaatctatagatggtgaaagatttggaccgatagcagagtcaagtctaagaaagatacaacaaggaacaagtagcttgatgttcgtataa

SEQ ID NO: 1201 - DNA, 1371 bp, Human gut metagenome
atgcagaagttatcagaaaagttaaagaacacaccaaggaatgcttcactagttccttgctctgtaaattctcaattaaacaaagaggaaactcttagtgttgagagtatagtactgactgataacaatcccgaagtgaatctatctcaacatgcagagagacttaaagtcaaagtgtatgtaatctctaaagagggcaatcctataatgccttgtagctgtgcaaaggctaaacatttgttgaaagagggaaaagcaaaagtgattaaaagaagtccgtttgctattcaattaaattttgaatgtgaaaaccaagttcaagacgttactttgggaattgatacaggatttgaattcattggtttttcagcagtctcagaaagagaagagctaattgcagggactttgaaattggatgggaaaacaaaagagagactgaatgataagagaatgtatcgaaggataaaaagaaacaaattatggtatagaaaaccaagattcaacaatagaaagaaagtaaaagattggttgcctccttcaattgaaagaagatatcaaactcatttaactttgattgaaaaaattaagaagatgttgcccataacacaagtgatagttgaagtagcaaaatttgatattcaaaaattagagaattcagagatacaaggagaagaatatcaacaaggtacattgtatggatatcaaaatacagtaagttatctgaaaacagttcagaaaaatatctgtccattttgtaaacgaaagcttgagtcgggtgaatctaaagcaactcatcacagatttatgaggagtgattcacgaagaacagacagaatagaaggattaattttattccataaaaaatgtcatgttcgacttcatgaacaaaaacgagaaaaagaatttcaaaacatcaagatcggtaagtatcaaccatcaattttcatgtctattattaataaaagattttggaaagatattcctgatttgaaagtaacttatggaaatgtcacctttgtggataggaataatttaggattagcaaaaagtcacaccaacgatgcttttgttattgcaaaaggaaactcacaaacaagagttaagtcttttgaaataattcaaaaacatagaaacaacagaatacttcagagacaaaggagaggatacaaaccaagcatcagaaggagtagatcaattatccagcctttagatttgatttggatcaaaggaattaaatatatttctaaaggaatgaatggatatgggagatacgtttatgttgatattggagaaaataaaacatctctcaacatgaaattagttgaaaaatattttagtcaaggcagtttatcatttagtttaaaaaattaa

SEQ ID NO: 1202 - DNA, 266 bp, Unknown
  Ga0114919_10025663  JGI
gtcaatcatcctaacctaaaggaaaggacttgatccgcgaggaacaagagcaattggttgattagggagcttaaaattacgaaaggagttttatgcagaagttatcagaaaagttaaagaacacaccaaggaatgcttcactagttccttgctctgtaaattctcaattaaacaaagaggaaactcttagtgttgagagtatagtactgactgataacaatcccgaagtgaatctatctcaacatgcagagagacttaaagtcaaa

SEQ ID NO: 1203 - DNA, 1338 bp, Unknown
  Ga0376445_000045 JGI
atgcaccgcgtgttcgtcctgagcagcaccgcagaaccgctcatgccctgccatccggcacgggcccgggcgctgctgtctgccgggaaggcgaaggtctatcggcgggtgccgttcaccgtcatcctcatggagcgcgccgagggcgagacgcaaccgctcaccgagcagctcgacccgggcagcaagaccacgggcatcgccctggtcgcgctgttccagcgcggccgctgcgtcgtctgggccggtgagatgagccaccgcggccaggcgatcaagtccggcctcgacagccgccgggctctgcgccgcgggcggcgccaccgcaagacccggtaccgcgcaccgcgctttgacaaccgccgccggccgccgggctggctgccgccatcgatccagtcccgcgtcgacaactgtgccgcctgggatgccaagctgcggcgcctagcaccggtgacagccatcgccgtcgagacggtgcgtttcgacacccaactgctggagcacccggacatcgccggcgtcgagtaccaacagggaacgctgctgggctgcgagctgcgcgagtacctgctggcgcgccaccatcacacctgcgcctactgcctggggcagtcgaaggatccgatcctggagcgcgagcacgtcgtgccgcgctgccgcggcggcagcgatcgggtggccaacgcggtgctggcctgccgcacttgcaatgtggccaaagcgaacctgctgccggggacatggatcgagcagctgcgtcgctcgaagaagcccattgacgccacccgcgcccggcagatggagaagatcctcaccggctggcggccgagcctgcgcgatgcggcggcgatgaacgccacccgctacgccatcggtcgcacactcaaggccgccggcctgccggtcagtttcagcagcggcggccgcacccgtttcaaccgcaccgctcagggctacccaaaagcgcactggatcgatgccgcctgcgtcggtgaggaaggcagcaccgtgcgcctggatccggcggccaagccgttgcagatccaggccgtcggccgcggcagccggcagatgacccggcccgaccgctacggcttcccgcgcaccggtgccaagcgcgtcaagcgcgtgctgggcttgcagaccggcgattgggtgcgactctgtcaatcgagcggcaagtacgcgggcacctacgtcggccgcgtagccgtgcgtgagcgtggcgacttcgacatccaggtcgtccgtgacggtcagaagatcaagattaccgcgccggcagcgcggttcaccctactgcaacgaggcgacggctatgcctacaccacctga

SEQ ID NO: 1204 - DNA, 287 bp, Unknown
  Ga0376445_000045 JGI
tccatcgccgcgcgtggtcagcgtgaggttcaggcgacagcccggacctgattcaaccagccccagccctttcgggctacgttacgcgggaatgccataggcaccccgggatgcttctccagtcccgggctctgcggtgagtcgttaaacagcacggcactgggacaacgggcagtgcggctcacgaaaaccccgcgataacctgggcgaggagaccttgacccccgcgaggggagaaccggcgggtaaccgccactgatttgagacaggagccgacgatgcaccgc

SEQ ID NO: 1205 - DNA, 1080 bp, Unknown
  Ga0255344_1006041 JGI
atgctagttccggtcgtagatcaggttggaacaccactccaacctactcaccccgcaaaagcacggcgttggttgaaagaaggacgttgctcgaagcattttcatcgtggcacgttctatattcgtttaaagaaaattgttacagaaccgcacataaatatcattctaggaatagatccgggttcgaaacgaactgcttttacagtggctacaagaaaccgtgtagtattgaattggatgattgattctacaaatttcacaaaaaacaatattgagaaacgacgtatgtatcgtcgacaaaggcgttatcgaaacacaccgtatcgtgaatgtaggtggaatcgctctagtcttcgtaatgatggacgtgttccgccctctactttatctaggtggaaaagacatttaagattgatttatagtttgttaaaaatacttccaatcactaaagttattattgaagatgtagctgctgttactcataattctaaaaagaagagattagttgactcaaagtatgtttcatgttggaatgctgctttttcaccattacaagctggaaagaatttattttataatttcttagaagaccgtgggatagcggtgtataagaaaaaaggttggcagacagcgaagcatcgtaagaaacatgggtataagaaaatttctgataaactttcaaccaaatgggaatatcaatgtatagattctcattcgttgtgtgagatgtattataatcgaaagattagacctgttcggaatttaaatttcatacaatttctcacattttctagacgcgaattatttcggatgtttggtaaaatcagaagaagacatgggtcgacaagaacactaggtcataacagaggcacgttggtttattgtaaatatgttaagcgtggtcgattagaaccaataggattatgttatttagcgggttacatgaaagtgaaagaagaatatcgagtatgtttatattctttacaaggtaaagaattgggccaaagtttcaaattaagtgattgtgtgatgttaacaaatttacgttatttaaataattatattcgaaacgaaaggtag

SEQ ID NO: 1206 - DNA, 211 bp, Unknown
  Ga0255344_1006041 JGI
gtcaactacccaccgctgaatcggtgggcttgtgggaaaaccgttagccaggactaaccacaattaaaacaagactagactgtccaaatgggttcttttgaactccgcgtggtcgagcggcaacgcatcggacacgtttgaaggaaactagctacctgtcgtggcagacaacatgtgacgttttgggtgttccgctagcctgattcctctc

SEQ ID NO: 1207 - DNA, 1314 bp, Bacillus sp. REN51N
atggtatttgtactcaaccaagaaggaaaacccttaatgccaaccaaacggcaccgtaaggtccgtctatggctaaaaaacggacaagctaaagtggtgaaacgaaaaccgtttaccattcaactattatttaaaaccgaagactatgttcaacccatatctttaggggtagacagtggtttttatcatatcggtatctctgctgtgacagagaaagaagaagtgttttcatcagaggtttcgttactaaaaggaatggtggaacgaaatgaagaacgtgcttcctatcgaagaacaagacgggctcgtcttcgttaccgaaaaccgcgttttgataaccgaaagaaagacaaaggatggttagccccatccattcaacataagctagatagtcacctgcgttatattgagtgggtaaagtctatacttcctatctctaacactattattgaagtcgctaattttgatacacagaagatattaaaccctgatattcaagggttagaatatcaagaaggcgtacaaaaagagttttataacttaagagaatacattttacaccgtgaccatcatacatgtcagaacccgaattgtaaaaacaaaagcaaagaaaaagtattggtccttcatcacattatcttccggtccaatggaggaagtgacagtcctaataacctcattactctttgtgataagtgtcataccccacgaaaccacaaagggtttttaagagactggagaccaaaggtgaaacgcctaaggtctgcgacctttatgagcatggtgcgttggaagttagtcaacgctttggagtgtaaccacacatatgggtacttgaccaagtctaaacgcatagaatttgaaatagagaagacacatgccaatgatgcgtttgtcattgcaggaggaacaagcaaacacgtaagagctcaagtccatcaggtggagcaggttcgaagaaacaaccgttctttagataagttctacgacgctaagtacattgacgctagaacgggagaaaaagcagcgggacaagacttatttaatggtcgaaccaagcgaaataaaaatacgaatggagagaacctccgaaagtatcgtcaggaaaaggtatctaaagggagaagagccatacgtactatgcgatatcctttccagccaagggatttagttcgaagtgaaggttacaccgcttttgtggtaggcactcaaaacaaaggcgcttacgttaaactaaaagatagaaaaaaagtagcgaaaaccgctacattaacgttaattaaaagtggaaaaggattctgctttctagactga

SEQ ID NO: 1208 - DNA, 293 bp, Bacillus sp. REN51N
gtcaataaccctcgactaaagtcgaaggcttgaaaaagcgtttgagagtcgaaatgcaagaccatcggtcttgtgttgattgattagccctaggctcctcttaggagactacgttaggagtgaaataggtaccctagaatactccactcgttctaggctctacggtttgttgttaaacatctctgagggtaaggagaagtgggacaaatgttaaaccactctataacatgggcaaagtggacctacagccttcggctgcattactcagtgtaaggagttaaaaaaagaaaatg

SEQ ID NO: 1209 - DNA, 1329 bp, Unknown
  GENOME_ACESSION: mgm4491404.3 MG-RAST
atgggcgaaggattacaaccggacgcgagtccgaggagacaaaacttgagagtatttgttttaaataaacgaggccaaccgctgatgccgtgttcaccggcaaaagcgcggttactgctgaaagagaaaaaagctgtggtgatgcgtcgtacgccattcaccatccagctcacgcaggccacgggtgaaaccgtgcagccagtgaagttgggcgtggacgccggttcgaaattcatcggcttatcggcttcgaccgacaaggctgagttctatgcgtcagaagtcgaacttcgtacggatgtagttgacttattgtcttcacgtcgggaactgcgtagggctcgtcgcaatcgtaagacacgttaccgtgcaccgcggttcaataatcgtgttcacagcaaaaacaagggttggttggcaccgagcgttgaaaacaaaattaacgcccatttatcccgcgttgacgctgtaaggcaacttctcccggtgacgaagatcgttgtggaaacggccagtttcgacatccagaagatcaagaacccggatatcgaaggggcggactatcagtggggagagcaactaggattttggaatgtccgcgaatacgttctctttcgtgatgggcatcggtgctgccattgccacggaaagtccaaagccccgattctgaatgtccaccatcttgaaagccgtaaaacgggtggggacgccccgaataacctgatcacgctatgcgagacgtgccataaggcgtatcacgctggaaagattgttctgaaggcaaagcgcggacaagcattccgagacgctgcctttatgggaatcatgcgatggacatttttcaaccgcctgaaggcacagtgcccggagcttgatgtacgaaatacctacggctatctgacgaaaaacacccgcatccgacacggactggacaaatcccatcatacggacgcgttctgtattgccggcaacctcggggcaaagcggctgggtgagtacttcttccaaaagcagactcgcaagcacaatcggcaaattcacaagatgtccatcctcaaaggcggtgtccgcaaacgacagcaggccccgtacgaggtaaaaggttttcggttgttcgacaaggtgcggtatggcagccgagaggcattcatcttcggaagacgcaattccggctactttgacatccgtttgttgaaaggcgagaaggtttctcctgccatcagttacaagtatcttcagcttttagaaagtcgaaaaacttttttaactcagcttattaagaaggacgcgattcctcccgcgactgaagtcgcgggtttcctcgcgtaa

SEQ ID NO: 1210 - DNA, 252 bp, Unknown
  GENOME_ACESSION: mgm4491404.3 MG-RAST
gtcaaccacccctgactaaaggcagaggcttgcgaaagcaagtcttagttgactagccccagtgaggagaaatccggactacgttggttgggaatgtataggcaccgcgggatgtcaatcctagtcccgtgctctgtggcccgtgattaaaagcactgagaggtaggtgcggtgttgcgggtatctgaaaccccttccaacatgggcgaaggattacaaccggacgcgagtccgaggagacaaaacttgaga

SEQ ID NO: 1211 - DNA, 855 bp, Unknown
  Ga0079226_10038291 JGI
atggccaccagtggtggccgcgtgacaaccaagccaaccggtgaggttgctggcggggttgtgcccgccccagtgcgtgcaccacagccgcgggtgttcgtgctggataagaataagcggccgttgcagccgatgcgcccggatcgggcgcgcaagctgctggatgcgggccgggcacgtgtgcaccggcgcgccccgtttgtgattcgcagggtcgatgtggatgcccgcaccgaggaggtgattgtcgatggggtcgaggtggggatcgaccccggatccaaggcaacgggtatcgctgctttcatcaccacaccggagggtgcccggcagggcgtctggctgggggagctggtgcatcggggcctgcagatcaaacaaaggatgcaggcacgtgcccagttgcgtcgtgggcgccggtcacggaactcgcgtcaccgggcgcccaggttcgataaccgtacccggcccgccgggtggcgcccaccctcgctggcccaccgggtcgataccaccctctcgtgggtgaacaggctgcgcagatgggcaccagtgatggcgatccacattgagcgggtcaggttcgacacccacgccatggccagccccgaggtcagtgggatcgagtatcagcagggcaccctggccgggtatgaggtccgcgagtacctgttggctaagttcgaccgggcgtgcgtgtactgcggggccagtggggtgccgctgaacatcgaccacgtccacccgcgcagcaagggcggctctgaccgggtctcgaatctggtgctggcctgcatcggctgtaatcaggccaaaggcaacatggctgtcgccgagttcgtgaccgaccctgcc

SEQ ID NO: 1212 - DNA, 337 bp, Unknown
  Ga0079226_10038291 JGI
gtcaaccaccccgccctgacggacggggcttgtgagcctcgtactagatgggctggttgaccagaccgagagaccttgaaaggaggaatctacgttgagcgtgcgacaggagaccgaccctgggatgcttcctcagtcccaggctctcgaatcagtgccagcagacacggctggggtagccacgaaacggggcactgaggtcgaagctgattcgacaccgggcgttcaacatggtcgaggggagatggccaccagtggtggccgcgtgacaaccaagccaaccggtgaggttgctggcggggttgtgcccgccccagtgcgtgcaccacagccgcgg

SEQ ID NO: 1213 - DNA, 1401 bp, Unknown
  Ga0194044_10012301 JGI
atgataaccctggctatagattacggtgcttcaaatgtgggtatagctctggtcagaaataccgaagcggggaatgaaccgctgttcgctggaactgttatcctcgatgctaggaagctgaaggaaaaagtggagacgagggctggcattagagggttgagaaggacgagaaagacgaagaatcgacggctcagagaacttggtgaagccctctcgggcttaggcatggagggagacaaggtcgccagaatagtccggttctcgaataggcgtgggtataagtctctgttttcagacccgaacgaaacggaaaaggtggacgaggctgaatcggcataccgatgcactagagaacagtttttccaccaactggaacaagaactgcaagagattctgagcgaccgtgaggcttgcgacaaagcactctccgtctgtgaaagaatactcaaccgcaagggggaccgatacgctgaaatcagattgataagaattgataatcggggagccagccgctgcgcatggggggattgcaacaaggtgaccccgaggcgggacaacgctactgacgatgcaattgcccagcaactggtcacgtattttcagagtgcaatcaagacggaaccccacaagcttgaaatgctcaaccaaacggtttgtgaactcgattcgatttccaagaatctccgaggggctattgcaaacaacgacgattcttcaaagaagatactgcgcaggagggcaagaaagagtctaagaaatcttagagccgagttaccaagcaccgaacctgaggacgtctcaggcgacgcgtggaagtatgtggaaaagggtattctgaacacccttgagaacagtggcggcaggaaccgttactgcagggaacacagcaagtcctacgtggaaaaagttctggaagggaagccaccagagttcaagtctaccattgcagattctgacattatttccagacgggaacagattgcgttcagcaagctctggagatacatagaggcgcgactgcttcctctcgctccgaagggaattgaccgaattgttgttgaacgaactgcgttcgaccttttagccggtaagcgaaagaaaattagagacgcctccagcgaaggtgtggaaaatatttatcagtacggccccatgtatgggttccccaatgaaaaggagatgctgcgaaaggaattcggagggctatgcgcttactgtggtaatccgtctgatacactcatggaccgagaccacatcctgccgaggcgagatttcttcttcgatagctatctgaacacactacccgcttgcccgacttgtaattcggaaaaatcggcgagtcttccttcccaggtctcacttcgaataagtgaggacgcctattcaatgtacaaacagtac

SEQ ID NO: 1214 - DNA, 292 bp, Unknown
  Ga0194044_10012301 JGI
atcagcacgcgccagcttcagatcgaccgaccttattaagtcctgcattcgagatactgcaccgagttcgtacaatgattagatggtctgcataagccatgaaaaccagaccgtttccttctgtataggaaggtcccgcttcttcttgtacggtcttgtaatatcattcaaattaacgactgtccagattcgtgccccaaatacttcctaggcatcttggggcgatgtcgctcggcacgtcctgcttatttatctatccgaatttatacagattctcccacatatcccgctg

SEQ ID NO: 1215 - DNA, 1266 bp, Unknown
  Ga0310914_10061055 JGI
atgcaacgaaaagttaaatccgatactagactggacaagattcaagactgcgaagttttgggtcgtttgaagtcaactgaacactctgggagtggtatcccgaaagatatgcccgatgcttcccaagtcgggcttccctctgggcgtcagcgtcgatgggattgcagacacctacacagcaagggcttaccgccaaatgctgtgattgttcctgtcctggcactggatggagaaccacttatgccgacgtgcgcgtcgcgtgctagacgttgggttaaacagcacaaagctacgccgttctggctcaatggtgtttggtgtgtgcggttgcgctttgagccgagcgacaggaataagcacgaagtggttgtcgggattgatccaggaagcaaacgcgaggcgtacaccgtggcttccaaagagcacacctatctgaatgtgctcagtgatgccatagattgggttaaggatgccgtgggatcgcgcaagattctgcgacgagcgcgacggaatcgcaagacaccataccgaactaacaagcagaatcgagcacgcggaggcatcccgccatcaaccaaagcacgttggcagctcaagctgcgagtggttaaccaactgcgaaagatgtttccgatcacagggtacgtggtcgaagacgtaaaggcgactacgcacggcaggggcaggcgctggaatagctctttctcaccgttggaagtcggcaagagctggatgtacggagagctgttaaagctcggaacactgactctcaaagccggtcacgagacggctgaactgcgaaaaactttcggcgtggtcaaatgctgcggtgacaagatgtcgatgcgctttgacatacataacgtggacagttgggtgctggcaaaagatgcacttggagcagcaaagggacgcccggagaatatgcaactggtgcacgcaaggccactccgattcaggcggcgcgcacttcacttgcagaatccaaccaaaggcggtgtccgccgtagtcatggtggaacgctgagccaaggatttaagcgcggctcactcgttaagcatccaaagcacgggctgacgagcgttggtggcactaaagacgaccgtatcagcctgcacaaagtttcaggaaaacgcctttgtcagaacgcgaaggctcaagacatcacattgctgcgaagaagctcgatagctttccggccgataccaaagaacggcattcctctgccgcctaaaggcgacagtttcctgcctaagattttatga

SEQ ID NO: 1216 - DNA, 251 bp, Unknown
  Ga0310914_10061055 JGI
gtaaacgaccgccagctaaagcaggcggctttttagagcagcaaaccaagcatgcaacgaaaagttaaatccgatactagactggacaagattcaagactgcgaagttttgggtcgtttgaagtcaactgaacactctgggagtggtatcccgaaagatatgcccgatgcttcccaagtcgggcttccctctgggcgtcagcgtcgatgggattgcagacacctacacagcaagggcttaccgccaaatgc

SEQ ID NO: 1217 - DNA, 1386 bp, Unknown
  Ga0223826_10007721 JGI
atgctgacatacgtattggcaaaagacggtacaccgctgatgccaacttataagatcaacaaggtgcgccgtatgctgaaggagggtaaagcggaaatcgcgggccataagcccgggtttaccatccgcctcctgtatgaaagcgggaagggtgcgcagcctgtagaggtttgtgaagataccggttatgggacaattggcgtatcggtaaagtccgaaaagcacgagttcacccatgaggagtatacgcttcttccggatgaaaagatccgtcacgatgactgccgtaaatacagaaggacaagaaggaaccgcatcaggcacagggctgccaagttcgataaccggaagaaggataagggctggatcgccccgtcactggataataaggtacagcgccatgtggatatcgtaaccatgtataaaaaagtgctgccagtaacggatgtgacgttggaagtaggaactttcgatacgcaggtgttggaagccgtagaggctggcagacccctccccaaggggatcgggtaccagtatggtccgcagtacgggtttgatacgctccgggaagcggtcttttaccgggacggatacaaatgcatctgctgcgggaagtccgctattaaggaccacgcgattcttaagatccatcaccttggatttttaaagggcgaccacagcgacaggatgggaaatttggccacggtttgttcgaagtgccatacaccttccaaccataaaccgggaggaaaactatataaccttaagcccaagctgaaaccgctcgggggcgcagcattcatgaatgccgtcaggtggaaaatatacaacatggttaaagagcggaaccctggtttatacgttcacatgacatatggcgcggttacaaaacgcgaacggttaaggcgccatattgggaagacgcacgccaatgatgcttactgcatagggtttttccacccaaaacataaaacaagggctgtggcctataagaaggtgaagaggaacgaccgtatccttcaaaagttttatgacgcagtatatatagaccgccgggacgggaaaaagaaaaaaggcgcggagctttcctgtaacaggacgaaccgctctgttccgaggaacaacagccggaatgaacgcccgttccgaaaggagaaggcgtcaaagggccatgtaacgacccgaaaggggcgtacacagctgaaaccgggaagccttgtactgtataaagggaaggtaatgactgtccacggcacacatacgaataaagggaaggtcaacgtagaattcacgcaaaaggcttcagatgacaggaaatccgcaaatttaagcaaagtaacaattatcaggcctatgtatcaatccgggtgggtgcgcataagctga

SEQ ID NO: 1218 - DNA, 319 bp, Unknown
  Ga0223826_10007721 JGI
ctatgtttccggcaaatatgtttaggagcttcggcatctgcactaaacgtataggcacttcggggtgctccacaagccccgcgcgtgaaaccctttcatcagggggttgagtggtacgaaagtacaaccctgcgcctgtgtgttaaaaacctctgaggtcaggaggcgtgcatacaggatataaaactgccggataaccttggcgatgtggaaccctgcctgtaagggcagagaaccccgcggcgcaacttaccgcgggaagccgtaaggcaaatgttactgtaaaccatacataagaaaaggaggcatcggaatgctg

SEQ ID NO: 1219 - DNA, 1476 bp, Unknown
  Ga0209656_10018899 JGI
atgcttcctcagtcccaggctcttcgagttgccgccgcagacaagccatggtcagcgcgaaacgggcagcaacagacggctacggttcaacctgttcgaggggaaatcaaaccggcgcctcaaaacgccgagcgcggggtaacccgcacgtttgtgttatcgaaagaggggaatcctttgatgccgtgttcaaatgccagggctaggattctgattcgtaaaggccgagccaaggtttatcggctattcccgttcacgattcagttgatagacaaagcatccggcgacgttcaaccagtcgctataaagttggaccccggagcaaatacgactggtgttgccttggttcgagagcatgcagacccgaccaaacaaaccgtgttgcacctcgcggaaatagcgcaccgaagccgagcgatacggaaacacatgatccagagggcgatgttcaggcgtcgccggcgaactgctaaccttcgataccgcgcaccaaggtttgataaccgaaccagacgcgaagactggctgcctccttcgcttcaaagccgagtcgacaatgtggcttcctggcttaaccggtaccgcaaactcgcaccaattacctcaatctacgttgagtccgtcaggttcgacatgcaggccttggaaaaccccgacatcgagggtttagagtaccagcggggtacgttgttcgggtcagaactctgggaatacctgcttgagaagtgggggcgaagatgcgcttactgcgatgcggaaggcctgccccttgaggcggaacacatcgcgcccaaggcttgcggcggatccaatagggtcagcaacctgacgctcgcctgccacaagtgcaaccaacggaagggatcacagccggttcatttgtttctggcaaacgatccgtccaggctggctcgcattctcagtcatacgaaaaaacccttatcgagtgccgcagcagtaaacgttacccgaaaagccactacccgagtcatgtctgcgacaggcttagaggttcactgctcatcgggcggtcgcacaaagtttaatcgtacccagctcggaattccgaagacccatgcgcttgacgccgcttgtgtcggtgaactctcagaacttgagagttcgaacattcccgtcctttgcatcaaagctaccgggcgcggaagttaccaacgcacccggctagacagtttcgggtttccgcgaggctatctcacgcgccaaaaggcggtgaaaggttttcaaacgggtgacttggtaaaggcaaccatgccaagagggaaattcaaaggcgtgcaccaaggccgattggcagtgcgagtgcgtggagcttttgtgatccagagctcagcaggaaacgtcgaaacgagctggaaacactgcaaacgtctcatgcgaaacgacggttacacctacgaaatcaactcaccggcgattcctccgccacctaaaggaggcggttccctcgcttattaa

SEQ ID NO: 1220 - DNA, 254 bp, Unknown
  Ga0209656_10018899 JGI
gtcaacgaccgccagctaaagcaggcggcttgtgagcgattgcaggcctgtgttgaccagaacaagtgaaaactacgttgagccgcaagcaaaagactaaccctgggatgcttcctcagtcccaggctcttcgagttgccgccgcagacaagccatggtcagcgcgaaacgggcagcaacagacggctacggttcaacctgttcgaggggaaatcaaaccggcgcctcaaaacgccgagcgcggggtaacccgc

SEQ ID NO: 1221 - DNA, 1293 bp, Unknown
  Candidate divison MSBL1 archaeon SCGC-AAA382M17 AAA382M17_Contig_8_C, whole genome shotgun sequence
atgagtcaaaaagtctacgttcggatcatgaggggcgaaccgctcatgcccacgaacccagcgaaggccaggcacctcttagatgacgacagagcggaggttgttaagaggaagccgttcacgattcggctgaagtacccaacaggagaaaacgggcaggaggtgaccctcggggtggacgccggctactccaccgtcgggttctccgccgtcacggaggatgaggagctgatccgcggtgagctcgacctgagagacgacgtgtccgataggctgaggcggagggcggactacaggagaaacaggcggagcaggaagaccaggtacagagaacctcgtttcgacaacagggggaaggaggacggctggctcgccccctcaataaagtacaagatgagcgaccacctccagctcgtcgagatgatcggggagctacttcccgttacccgaaccgtggttgaggtggccacgttcgacacggagaagctggcggaccctgagctggacgtgacggagtacgtcccggagacgttcaggggttacgaggtgaaggagtacctgctggcgaagtgggggaggaggtgcgtctactgcggcgcggaggacgtgccccttgaggtcgaccacatagtcccgaagtcgaggggcggttcggaccgggtcgacaacctgacgatcagttgcgtggactgcaaccgggagaagggcgaccggaccgcagaggagtatgggcaccctgaggtacagaggaaggcgggggagtccctgaaggaggccgcgttcgtgaacatcgtccggtggaagatcgtgaacgagctggactgcgaccacacgtacggctacaggacgaagaagggacgcatagacctcggcctggagaagtccgacgacaacgacgccttcgtgatagcgggcggcggggaccaggagcgaactggaccctaccgcgtcacccgtggacgccggaacaaccgcaagctggagatcaacaggaggggtcacggccggagcgtccgtcgggagcgctacgagttccagccgggtgatttggtcagaggggatgacgctctgtaccgcgtcaggggttcctgctcctatggcaggtacgtccgagcctttgacgaagaaaggaacgaggaatacttgagagcggattccctcaaacttgtgaagtacggtaaaggtctctgctggcgggagaaaacaagtcgcaattcctctcccaccgaatccgaagattcgaaaggagtctcctcgcgacaaccagatggaatggcggagagattgtggtaa

SEQ ID NO: 1222 - DNA, 342 bp, Unknown
  Candidate divison MSBL1 archaeon SCGC-AAA382M17 AAA382M17_Contig_8_C, whole genome shotgun sequence
gttgactactcccacctaagctctgcttaggaaggagcctgaaagggttccgatccgggagcgggagactagccttggcgatgtcccctcgggagtgggggcagatgagctacgttcggggctgagtgttcgaaaagcacttgtggatgcctcccaagtccgcaactctgcaaggcaggtggacgaaacacgccgttatcccgatggtgtgcaacatcacctgttcgagcccaccccaacattggcgatgggaacttactcctctggtgtgcgggaggccgggactcgagagtccccggcatttaacataccatttaggacgtgtacaaaatgagtcaaaaa

SEQ ID NO: 1223 - DNA, 1437 bp, Ferroplasma sp. Type II
atggagaaacatatgaaagagaagcagaagttagataggagagatacatacacacctacggatgctccacaagtccgtggcaactgtgatcatgcattaaacagagaggaaactctcagtgtgcatggtttaaaaaccccttctaacaacccccatgtggacctactctcaccggtaggagggcataaagccgatatgccggtatttattctaaacgatgatggaaaaccattgattccatgcaaacccgccaaggcaagacatcttctaagtgacaagaaagccaaagtaatttcttctaatccgttcacaatacagttgctttggcattgtgagggaaacgtggaaacaataacactgggcatagattctggatacaaacacataggtttttctgctgtaacagacaataaagaactcatatccggggaagtagtaataagaactgacataccgaagctcaatgaagaaaaggcaatgtaccgcagaaaaaagagaaataagctctggtacaggaaaccaagattcatgaatcgtggcaataataaagaaggacggttcgcaccaagcattgaacacaaactggaaactcatataagattgattgagaagttgaagcgaatacttcccgtatcaaacacagtgatagaggttgcatcctttgatacccagaagatgaagaatcctgagataagtggaatagaataccagcagggagaacttcagggatatgagatcagggaatatctccttgagaaattccatcgcacatgtgtgtattgtggcaagacaggtgtgcctcttgaaatagagcatctaacgcccagatcaagagatggtcccgatacggtcaataatctcgcaatctcatgtcatgactgtaaccagaagaagaacaacctcacagcagaagagtttggatatcctgaagtgaggaagagggcattgatcaccatgagagatgcagcattcatgaacactgtaaggtggaagcttacacaacttacaggatcagaacatacattgggattcattacaaagaagaatcgtatttctcttggtctggataaaacccatgccaacgatgcatttgtgattgctggaggaactgttcagatcaggacattgccatttacaatcacacagagaaggaggaacaaccgttccatccagacgaacaggaagggattcaggccatcaataataaggaaaagatatgcattccagcctggagacatggttctgcatgatcatgagagattcagtgttgttggtatgcataactatgggaaatcaatcgtaataaaaggaggagggaagaagatggacataaacacgaagaaggtcaagctggtaaaatatggaaaaggattgcaattcgcaccccaattccttcccaccctttcggatggggtctcattggggggagttagatga

SEQ ID NO: 1224 - DNA, 277 bp, Ferroplasma sp. Type II
gtcaactacccctccctgacggaaggggcttgtctcgtgaggaacagcgcaagagttgattagggggctttaaaaacatggagaaacatatgaaagagaagcagaagttagataggagagatacatacacacctacggatgctccacaagtccgtggcaactgtgatcatgcattaaacagagaggaaactctcagtgtgcatggtttaaaaaccccttctaacaacccccatgtggacctactctcaccggtaggagggcataaagccgatatgcc

SEQ ID NO: 1225 - DNA, 1815 bp, Mastigocladus laminosus UU774
  MISC_FEATURE (949)..(1668): Any "N" represents any nucleotide
atgttacgagtaccagtattaacaccatcaggcaaaccattgatgccaaccaaagcaagtagggcgcgtcgttggctcaaagaggggaaagcgcgggttgtatataacgacgttggtatcttccagattcagttagtcagatgccccaggacgcaagacatacaacccattgcggttggcatcgacccaggtaaattgtacacaggtattggtgtacagtctgccaagtttactttgtggttggcacatctccaattaccgttcaaaacggtgcgagaacgcatggagcaacgcgccatgatgcggagagggcgtagaggtagacggattaaccgcaagttgccctacaatcaacgcgcacatcgccagaaacgttttgacaatcgtcgtcaatgcaagattccaccaagtattcgtgctaaccgcgaattagagttacgggtgcttgacgaattatcgctgatttacccaattaccacggttgcctacgaaatagtaaaagcgagtggtgataaggggtttagtcctgtgatagttggtcagaaatggcaattagagaatctggcaacctatgccgaagttaaacaggttgagggttggcaaaccgccaatattagacagcagctaggattgcacaaacaaaaacattctaaaggtgacgcaattcctgcaacccacgctgtagacggtgttgctgcttcgtgtagcgcctttgttcggtacggcatcattgaccgtcattcacgaggctggaaaggtgatgttactgtaactcccgcacccttcacagttattcgccgtcccccagtatcgcgccgccaactacaccttatgcttccctccatcggtggggtaaggagaaagtacggtggcactgtaacccggcacgattttagaaagggtgacttagtaaaagtccctagtggtgaaattggttattgcagtggcnnnnnnnnnnnnnnnnnnnnnnnnnnnnnnnnnnnnnnnnnnnnnnnnnnnnnnnnnnnnnnnnnnnnnnnnnnnnnnnnnnnnnnnnnnnnnnnnnnnnnnnnnnnnnnnnnnnnnnnnnnnnnnnnnnnnnnnnnnnnnnnnnnnnnnnnnnnnnnnnnnnnnnnnnnnnnnnnnnnnnnnnnnnnnnnnnnnnnnnnnnnnnnnnnnnnnnnnnnnnnnnnnnnnnnnnnnnnnnnnnnnnnnnnnnnnnnnnnnnnnnnnnnnnnnnnnnnnnnnnnnnnnnnnnnnnnnnnnnnnnnnnnnnnnnnnnnnnnnnnnnnnnnnnnnnnnnnnnnnnnnnnnnnnnnnnnnnnnnnnnnnnnnnnnnnnnnnnnnnnnnnnnnnnnnnnnnnnnnnnnnnnnnnnnnnnnnnnnnnnnnnnnnnnnnnnnnnnnnnnnnnnnnnnnnnnnnnnnnnnnnnnnnnnnnnnnnnnnnnnnnnnnnnnnnnnnnnnnnnnnnnnnnnnnnnnnnnnnnnnnnnnnnnnnnnnnnnnnnnnnnnnnnnnnnnnnnnnnnnnnnnnnnnnnnnnnnnnnnnnnnnnnnnnnnnnnnnnnnnnnnnnnnnnnnnnnnnnnnnnnnnnnnnnnnnnnnnnnnnnnnnnnnnnnnnnnnnnnnnnnnnnnnnnnnnnnnnnnnnnnnnnnnnnnnnnnnnnnnnnnnnnnnnnnnnnnnnnnnnncgccaagttgttcccggtgatcaactaattatgactgtggaactgttgtggatcaaacaacgtcgtttcggtaagatgcaggctcgcgccgaggttgacagtcagttagttgctgaaggcgaattaatgttttccctcgtaagctga

SEQ ID NO: 1226 - DNA, 235 bp, Mastigocladus laminosus UU774
ttcaactaccccgccctgcctaacggctgaggacggggattgctaaaaacaaatttagcagcgcaagtgttgaatagcccactaagactaatcctgatacgcacttccgaatgcttccccagttcggattatctgcaagactttttgttaagtcgttgggtaaagccaagtcattctggattagttgggcgaggggacttaacactttactcggaggtttatcaccatgttacga

SEQ ID NO: 1227 - DNA, 1194 bp, Lactococcus sp. 1JSPR-7
atggtacgtcgatggattaaaacaggacaagcacactggattggacgtgacaccattcaattcgaccgtccaataggttcagaaacacaagaactcacattaggcattaatgccggctataaaatcattggtgcatcagtgacaagtgagacacaagagtattatgcctcagaaacgaacctgcgcactgatattgtcaagaacttgagtacaaaacgtcaatatagacggtctcgtagaaatcacaagacacgatatcgtcaggcacgctttgacaatcgtgtgaagtcaaagcataaaggttggcttgcctcaagtattgaagtcaagattgacaatcatgtccagctcattcgcaagcttataaagaagcttccgataactaatattatcgttgaagctggacagtttgacattcaaaatctcaaaaaccctgacatcacaggtaaagaataccaagaaggaaatcaacttggatttgctaatgtcagagagtatgtcttagcaagagaccatcacaaatgtcaacactgcaaggcagatggtttgaaaggtatcaagttacacgtccgtcacctcgtctcacgaaaagtgggaggtaaccgccctgacaatctcatcattttgtgtgaaaactgtcacgcagcttaccaccgtggcgagtttgaattaaagaaagcaccaaaaggctatgcgccagctagtgcaatgtcaatcatgcgttcgaccctgcttgaccgactcattaatgaatttggtgacaaggtggagacaacgtttggctatttggtcaaagaagcacgactcacaattgacttgccaaaaacaagcatgactgatgccttcgtcattgcaggcaatctaatggctgacagattagactttcaagagctgagaaagcatgtgcgctgccataacagacaactccacaaagcaaaatttcttaaaggtggcatccgcaaagccaatcaagctccaagagaagttcatggttttcgactgtttgacaaggttcaggtagaaaacaaaaattggtttgtttttggaagaagaaccagtggctattttgaccttcgtagtctgacaggagaaaagctcaataaggggagctatagtgccaaaaaaattaagctcgtacaccgagcaaattcagtaatcacacaatacgcaacaatcgctccaacgggagcatag

SEQ ID NO: 1228 - DNA, 209 bp, Lactococcus sp. 1JSPR-7
atcaaggaggttcaatagctccagtgacacacgggtttgaaaacccatgattgctcgctttgctcagtcgcattgcaagatgtgattcgagcgaaatattgaatagtctaagctagaaatagctacgttatcttggttaacagacccgtggacctttgttctcatctacggctctctggaggcactgtaaacagttctgttggagacgg

SEQ ID NO: 1229 - DNA, 1341 bp, Wastewater metagenome
atgtttaaacaattaaactttaataaagtgttagtcttggatactaaccgcaaaccactgatgccatgctatccagcacgagccaaaaaattgctttcaagtggtcgtgcttctgtatttcgcagatttccatttactattattttgcatgatcgaactggggaagaaagcaatctacaagacatagaaatcaaaatcgaccagggttctaaaaccactggtgtagccttagttgtacatggtgccacaggccatgctgtggcctttgctgcacacattgagcatagaaccaatattaaatttgctcttgattcaagacgtgctattcgcagaagcaaaagacaacgtaaaacacgttatcgccaagctagatttctcaaccgtactaagcctaaaggatggctgccaccatcgttggtaagcaaagctgagaatattttaaactgggttgtccgctttgctaaattaacaccccttagcaagtttgcacttgagacagctaagtttgacactcaaaagcttgagaaccctagtattaaaggtgttgaatatcaacaaggtaaaatgtttggatatgctgataagaaagcttatctacttgaacgtgaaaactattactgtatttactgtggcatacatgctagtcaagccaaaatggagattgaacacgttatacctagaagtaaaggtggtacagatagtctgaacaatcttgtattatcctgtgaaacctgtaatcaggccaaaggtaatcaagatgttgaaaccttcctaaaaggtaaaccaagtgtattaaaacgtgtgaaaaaacatttagatacaagtcacaaagatgctgcacatatgaacagtattcgttggtatgtgatgaacaatctccgaggcatggcagatgccattggtgcaactctaaaaattggttttggttcaactactaaacaaaatcgtttatcacttggattgcccaaagatcattggattgatgctgcggtttgtacaagtgatggtagtactgtcaaagtagaaccaaatttaaaaccgcttattatcaaagcagtgggtcgaggctcaaggcaattctgtcgtatggacaaatatgggtttccaagaactagtccaaaacctagaagtaaaaacttctttggttttaaaacaggagatatggttaaagccgttatacctgaaggagctaaaaccaaagtacctgcaagtacctatgtaggccgtgtagcggtgcgtagtacaggttactttgatgtaaaaaccagaaataccaagatcactatgtcttataaacattgtaaaccaattcacttaatggacggatatagttatgcgtaa

SEQ ID NO: 1230 - DNA, 266 bp, Wastewater metagenome
gtcaacaaccccaccctaaagggtgaggcttgcaaaagcctagttgaccagccttagttttaagctacgttatcttagttatcacactttagagtgcttcaccagctctaaaccctgtgcaggctctgtaaacatctcttgggtaagagaagtcaacctgaatttggcattaaattgcaaagcttagataacattggcgaggtgaacgttacaacagtgatttatcactaggttccgtaaggaaaaaaatatgtttaaacaattaa

SEQ ID NO: 1231 - DNA, 1101 bp, Unknown
  Ga0099741_1041 JGI
atgcaaaatctaagagttccagtgttgaatccagatggctgccccgctatgccaaccaaacccagccgcgcacgtcgttggctcaaggagggcaaggcacgagttatctataacgatctgagcatcttctctattcagctaatagaggagccatcgggtagaaacactcagcaggtggtgttaggtattgatccaggaaaattatacacaggtatagcagcacagacagctagagccactctatttatggcgcacctgcaattacctttccagacggtcaaagatcggatggagcaacgccgagtgatgcgtcgattgcgacgctatcgtaactgccgtcgtcgtcccgccagattctcgaatcgacgggtcaaaaaagtaccaccatcaatcaaggctaatcgtcaacttgaactacgggtagccaaagaattgtgtgccgtatatcccatcaccttgattgtttacgaggtggtcaaggctgctggttccaagtctttctcccctgtaatggttggacagttttggatgcttagtcaacttgagaaactgcgcccaactgagcagaaatatggttgggaaacttctcaagttcggactcaattggggctggaaaagcagaaaaatcacaaaggcgacactatccctcaaactcatgcagttgacggcattgctctagcagccagtcaattcctaacctatcaacaatggcacactaaaaatgctcatggagctaattgggtgggtttttgtcgggttactcctgctctatttttcgtgattcgcagaccaccaattaaccgccgtcaactgcatctcatggttccggctattggtggaattaggcgcaagtatggcggtacgacaactaggcatggattaagaaaaggagatctagtccaagcagaacaggcaagtcgtgtatctattggttgggtgagtggcgacacgaaaaaccaaatatcagtgtctaatttcggctggaaacgtattgctcagtttacagcctcaaaagtccatttgattcagcgctcaacgggtttactcgttgcgtcagatggcaagttgtcaaggttgacggcattgagtcatcaaccttga

SEQ ID NO: 1232 - DNA, 243 bp, Unknown
  Ga0099741_1041 JGI
gtcaactaccccaccctagtcgaaacgaccgaggatggggcttaaaagaaagccaatcttttaacgcaagagttgactagaccacttacaaaacatctagttggcacgcacttccgaatacttctctagttcggactatctgcaaactgattggttttcagtgttgtttaaagacaagacatcttgctagatgtggtcgaagagacaaataactgcaaaggattatctctatgcaaaatctaa

SEQ ID NO: 1233 - DNA, 717 bp, Unknown
  Ga0376514_000350 JGI
gtggaaggatggttgccgccttcattaaaaagccgggttcacaatatcgaaacctggaccaaccggttgtgccggttttgcaatattcaggcaatttcaatggagttggtgcggtttgacatgcagaaaatacagaatcccgaaatatccggtgtcgcgtatcagcagggggaactcatgggttatgaggtgcgggaataccttctggaaaaatgggacagaacgtgtgcctattgcggaaaaacagatatcccgttggagattgaacatatcgtgccaaaatcgaaaggtggttccaacagagtcagcaatctgacactggcctgtagggcgtgcaacaggaagaaggggaacaagcccctagaagagttcctttcaaggaaaccgggactgttgaagcgaattcaaaagcagtctaaagtgccgctcaaggatgcgggtgccgtcaacacgacccgatgggacttgttccgtaccttgaaaaaaatcggactgccggttgaaacaggctccggcggtctgacaaaattcaaccggacgaccaggggacttcacaaaacgcattggctcgatgccgcctgtgtcgggaaaagcacacctgaaaagatttttcagatcgacaaaaccgtgttgattgtaaaggcagacggtcatggctcaaggcagatatgcagggtaaacaagttcggattcccggacaacagcaaagtcaactga

SEQ ID NO: 1234 - DNA, 260 bp, Unknown
  Ga0376514_000350 JGI
gtcaactacccctcggctgaagaccgaggggcttgaaaaagccccaaagttgaccagtctaagtgcttcgagtactacgttagatcgaaaacaggtatcctggggtgctcgccggctccaggttctacggcaagtggttaaacaggtctaaggggttaaacaggtctaaggggttaaaccggtgctgcttgcgccaaacccggtcataacattgacgcggcaaacattaccttggaaacaagaggattttaaaattgagt

SEQ ID NO: 1235 - DNA, 1281 bp, Human gut metagenome
ttggcgaaggatcattaccggtcaatagaccgcgaggaaactaacttgagagtatatgttttgaacaaacgaggagaaccgctgatgccgtgttcgtcagccaaggcacggattcttctcaaagaaaagaaggcggtggtgaaacggcgcacacccttcaccattcagctcacgatcgccacgggagaaacgacgcagcccgtgaccctcggcgtcgacgccgggtacaagcacgttggactttcggcctccaccaaaaaggcggaactctatgcgtcggaaatcgaacttcgtcaggacgtttccgagcttcttgcgggtcgcagtgctctgcgtcacgcccgtcgatcccgcaagacccgtcaccgtgctccgcggttcgacaaccgcaagagagataagggatggcttgcgccgtccgtggagaaccgcatcggcgcacatgtctctcgcgttgaggcggtcctgcgcatcctgccggtgacgaagatcatcgtggaaacggcgtcctttgacgtgcagcgtctgaagaatcccgacattcagggtgtcgagtatcaacagggcgaacagctcggcttctggaacgttcgtgaatacgtccttttccgagacggacacgagtgccaacactgccacggaaagtccaaggacaaggttctcaacgtccatcacattgagagccggcgcacgggaggcgacgctcccaacaatctgatcacgctctgcgagacgtgccacaaggcattccaccgcggcgagatcgagttgagagtgaaacgcggccgatcgtttcaggcggaaaccttcatgggcgtcatgcgctggacgttcttcgagcggctgcgggcgaggcactccgaaattgaggttcgaaacacattcggttatctcacgaagaacacccgcatcacacacggaattgagaaaactcactgcgcggacgccttctgcattgcgggcaacctcaaggcgaagcggctcggatactacttctttcagaaacagacccgccgccacaaccgacagatccacaagctcacgatcctcaagggtggcgctcgcaaacgccatcagacgccgtacgaaatcaaaggattccgtctttacgacaaggtcctgttccagggcaaaacggccttcatcttcggccgtcgttcttcgggatacttcgacattcgaacgttggacggggagcggatttccgccagcgtcagctacaagaaactgcgtctcttggaaaaacgtcgcacctatttgattgagctcagacgcaactaa

SEQ ID NO: 1236 - DNA, 259 bp, Human gut metagenome
gtcaataacccctgtctaaagacagaggcttgatagccattgtggccttcgagccttgattgactagcctcagtccgccgtaacggactacgttggttgggaatgtataggcaccgcgggatgtagatcctagtcccgcgctctgcggccggcggttaaaagctctgagaggtaggagcggtgccgtcggtgaaaaccccttccaacattggcgaaggatcattaccggtcaatagaccgcgaggaaactaacttgaga

SEQ ID NO: 1237 - DNA, 1197 bp, Unknown
  Ga0256829_1001599 JGI
atggtaagagttgtaagcatagacggtaaaaatcttatgcctactaatagacatggtaaagtaagaagattgctaaaggataataaagcaaaagttatatgcaaaaatccttttacaattcaattgctttatcagacagatgatgttactcaaaagataacaataggagtagatacaggatataaatttacaggatttgcttttatagcaaataataaagttttacaaaaaggaactattgaactaagacaagatgtttcatcattaattactttaagaagaacattaagaagaggtagaagaaatagaaaaacaagatacagaaaaccaagatttctaaatagaacaagacctgacggatggttagccccatcaacacaaagtaaatacaatcatatcttgaattggatagatagatttactaaatatcttccaaattaccaactaaaagtagaaatagcaaattttgatattgcaaaaattaataatcctgatatagaaaaagagttatatcagcagggaaatatgtatggatatgagaatataaaacagtatttattagcaagagaacatggaacttgtcaatattgcaagaaaaagaagaatgataaatggcatatacaccatatagttccaaaatcaaaaggtggaagtgatagggtagataatttagctttactgcatgaaagttgtcataagaaacttcatgagaaaaatgatactaataaaatatctaagcccaaacagtataaagatgcaacatttatgaatatcataaaatggaaacttgtcaatgatttaaaagccaaatatcaagataaagtatcttttacctttggttatatcactaaaatagacagaaatgatttaggattagaaaaaactcactacaacgatgcaatagcaataacaaaagagatagtcaatgaaaataaaagcaatcctatttatatcaaacaagttagaaagaaaaaaaggtctttacatgaagcaacaccacgaaaaggtagaagaataaaaaatacaactcaaaagagaagctctaaaaatacaaaagggataacagtaaacaataaaaaaatagctttatatgataaagtaaaaataaataatcaaataggttatgtcagtggctttacaggtaaaatggtttatgtgatagatatacaaggcaactatatcaaacagtcaaataaa

SEQ ID NO: 1238 - DNA, 276 bp, Unknown
  Ga0256829_1001599 JGI
aatcacctcccctaaatctcagattatagaggaggcttgttagcaatagcaagataatcaatggttgactagactaagttgcctcgcaagaggtcaaactaccttattactgttatcacacctttggatgatacccaagtccaaagctctgtgctgatactgtaaacaaagaggaaactcttagtcagtatcaggtaaaaagcagtaataagattgtcgatgggtaattactccgtaaggagctttacaagattatatataaaggacaaagagatg

SEQ ID NO: 1239 - DNA, 837 bp, Unknown
  GENOME_ACESSION: mgm4799989.3 MG-RAST
atgggagaattactccgtaaggaggtgggctatatgttagtctacgttattaacaggcacgggaaaccgctaatgccgtgtaaaccgcagaaggcacggaagctattgaaagaacagaaggctaaagtagttaaaagaacaccattcaccattcagttgttgtacggttcctctggatacagacaagatgtaattctcggtgtagatgccggaagtaagacaatagggctatcggccacaactgagaacagggaagtattttcagcagaagtcgaattgagaacagatattgaggtcgaacttaaagtcaaacgcaactcctcattcagggatgcagactttatgggcataatgcgatgggctttctacgataaactaaaagaactgtattcaaatgtgtctctaacttttgggtacataactaaacacgctcgcattaaacacaatctcgaaaagtcgcaccgtataaatgccaggtgcatctcaggaaacccatcgacaaaagaaagcgattgttggtacttcttcaaacaagtacgcaaacaaaacaggcaattgcacaaaacaaatccgaaaaagggtatccgcagagagaacaaagctcctggatacgtacacggttatcagctgttcgataaggttgaatatcttggtagggaatgttttgtgtttggacgcagatcgtccggatattttgatttgcgtactcttgacggagaagtcgtcagtcgttctgccagtgtaggtaaactaaaacttgtagaaagagcttcatcattattgtgtgaaaggagggaagcgtcatttctcaccgcgctaaagcacggtgtctcctga

SEQ ID NO: 1240 - DNA, 235 bp, Unknown
  GENOME_ACESSION: mgm4799989.3 MG-RAST
gtcaacgacccccggcaaaagccgtgagctagtagctcttgttgactagcctaagtgtttcgagcactacgttaccggcaaatgtataggcaccgtaggatgcgttcccaagtcttacgctctgcggttagtggttaaacagttctgatgggtagggacagtgctgctaacgagaaactgtcggataacattggcgatgggagaattactccgtaaggaggtgggctatatgtta

SEQ ID NO: 1241 - DNA, 1668 bp, Viral metagenome
atgcttcctcagtcccaggctcttgaatccgcgtcagcagacaaccgtaagggcaaggacgaaacgggacacggacgtcgtggaaacatgataactggtatgcaacatggtcgagaggatcgtttcttagagttcacctctctgggagacagtcacactgcaacttcggagcaatccgagggagcagaagcacggggcgttatagccccacccaatagtaccgcatcacgggtgttcgtgcttgacaagcacgggaagccgctcatgccctgtcatccagccagggcacgcaaattacttaagtccggacgagccagagtccaccgactggctccgttcgtgattagagtggtggacagagaaatagagcagtgtgaggttcccggagtcaccataaagattgatccaggttccaagcacaccggcattgtctgtgccagcgtagatgaggccggtataactcatgggctggtgtcgatccagctcgaccatcgcgggcagcttattcacaagaggatggaacagcgggccaactaccgccgtcgcaggcgctcggccaatctacgttatcgtgctccacggtggagaaatcgccacccgcaggcttgccgggcatgcgggaaaaatgcaaagcacaacaaggggtattgcggcccgtgcatacaaaagcgtgatttcgtggataacggatatcgccagtaccgtcttccaccaagcctcttccatcgagtcgcaaccaccacagcgtgggtaaatcgcctgtccagatgggctccggtcacgggtctggcgatggaactggtgcgctttgatactcaggtaatgcagaaccccgaaatttcaggtgttgagtaccagcagggcaccctagcaggttacgaggtacgggaatacttattggaaaaatgggacagaaagtgcgcttattgtggagccagcggtgtgccgcttaacattgatcacgttgttgctcgatccagaggggggactaatcggatatcaaatcttactctgtcctgcagaagctgcaacgaatccaaaggttctgaagacgcagaagtttggtgcaaacgacgcttcggagaacagaacggagagaagattgctcgtaaggtcaccgctcaggcaaaagcatcactcaaggatacagcagcagttaattccacccgttgggcattatggagagaacttctgaaaacgggactgccagttgaaaccggtacaggtgggcaaaccaagtggaacaggaaacgattcggtatccccaagtctcacacccttgatgctctctgcgttggagaggttgataatatcggatcagtgcccaatagcgtgttgatcgttgcctgtacaggacgaggcaagcatcagaggacgacactagacaaatacggttttgtccgttcaaggttgccacgaaccaagactcatcacggcttgcgcaccggggattttgtgcgggcggtggcgtcgaagggcaagcacaagggtgtccatgctggccgcgtaatcgcgcgttcatctggaagcgtctttgtgggtaaggtagatgggatttcttgcaagaactgctcggttttacaacgggcagatggttatggatataatagaaaggaggaagcgcttctcatttccgccctcacggacggggcttccgaggcgcgataa

SEQ ID NO: 1242 - DNA, 223 bp, Viral metagenome
gtcaactaccccgtcctgatggacgaggcttgcggaaagtttccggaagcccaggttgaccagaccgagatattagaaagaaggtgagacaaaatatctacgttgtatacgagtaagaggaccaaccctgggatgcttcctcagtcccaggctcttgaatccgcgtcagcagacaaccgtaagggcaaggacgaaacgggacacggacgtcgtggaaacatga

SEQ ID NO: 1243 - DNA, 1680 bp, Unknown
  Ga0207433_10050431 JGI
atggctacgttgcacacgagcgagaagacccaccgggggatgcttcctcagtcccctgctctggaacccgtgccagcagacaaccccggggtagggacgaaacggggcacggggccggtacccatcccgggcactggtgtgcaccatggtcgaggggagaccggggatgtgtgtgcctgcgcaccccggcgtcacccgtcgaagaccgacgaaccggtcgagacggagagcggggctgttaccggccctgtcgctgtacccttgtccgtcgcgtcccgggtgttcgtgctcggggtcgacggcgctgcgttggacccgtgccatccggctcgtgcccgcaggttgctcgcctgcggccgggcccgggtggcgcaccacaccccgttcgtcatccgcctgatcgacaggagcgccgagcagtccgtcacccacccgctcgccgtcaagatcgacccaggctcccgccacaccggcatggtcgtcgcccgggtcgacccggagggccgcacccacggcttgttcgccgtgcaggtcgatcatcggggccgccagatctccgagcggctgacagcccgggccggctaccggcgtcggcggcgcagcgccaacctgcgctaccgggccccgcgttggcgtaaccgccacccggccgcctgcgacgcctgtggggcgaatgccatccacggccgccggttctgccgtccctgcgcagccgccaagaccccggggatgggagcgagagagtcccggcttgccccgagcctcgcccaccgggtcgacgggacctgctcgatggtggcccgcctggcccgctgggcgccggtcgctgcggcggtgatggaactggtccgcttcgacctccaagccctcgaggaccccggcatcgccgggatcggctaccagcagggcaccctcgccggttacgagatccgcgagtacctgttggagaagtacagccgcacttgcgtgtactgcgacaggaccggcgtgccgctccaagtcgagcacgtccggccccgttcccgctccggctcggaccgggtctcgaacctggtcatcgcctgcgatccgtgcaacaacgcgaaagactcccgctccgtcgaggagttcttggccgccgaccccgaccgcctggccaaggtcctcgccgggctccgcaagcccctgcgggacgcgaccgcggtcaacgccacccggtgggccctgcaccgccgcctccaggccatgttccccgaccgagtgagcgtcggttccggtgggcgcaccaaatacaaccggacccgagccggcctacccaagacccacaccctcgacgccctctgcgtcggaaggacccacgcagtcaactcgtacccggcgcagttggttatagctgtcgccgtcggccgaggcgtgtactcccgcaccgtccccgacgcctacggtttcccccgcctacaacgaccccgcaccaaactcgcccacggctacgccaccggcgacctcgtcagagcggccattccaaccggcaagtacaccggtacccataccggacgagtgatggtccggaccagcggagcgttcgacgtccgcaccctcaccgggcgagtcggcgccaaccggcggcactgcagtctccttcaacgagccgacggctggagatggtcccgccaggaagaaggacattccaatgactcatga

SEQ ID NO: 1244 - DNA, 310 bp, Unknown
  Ga0207433_10050431 JGI
gtcaaccaccccgccctagcggatgggggctagtggcgaagcgattcgctgccagtcccgtccgactagggctggttgaccagaccgagccatcgaaaggaggcgaacagatggctacgttgcacacgagcgagaagacccaccgggggatgcttcctcagtcccctgctctggaacccgtgccagcagacaaccccggggtagggacgaaacggggcacggggccggtacccatcccgggcactggtgtgcaccatggtcgaggggagaccggggatgtgtgtgcctgcgcaccccggcgtcacccgtc

SEQ ID NO: 1245 - DNA, 1335 bp, Unknown
  Ga0207433_10084486 JGI
gtggaagactccaccttgcagccggttcggctcaagctggaccccggcagcaagaccacgggcatggcgctggtgcgggagtcggaggaggtctatcccgacacgggcgaggtgcagcgcacggcgcatgtgctgaagctggccgatcttcagcaccgcggacacgtgatccgcgaagcgctcacgcagcgtgcgtcgtttcgccgccgtcggcgcggtgcgaacctgcgtcaccgcgcaccgcgcttctgcaaccgcacgcgcccggctggctggcttgcgccatccttgcagcaccgcgccgacacgacgctggcctgggtgcgcaggttgcagcgctggtcgccaatcacagcgctgtcgcaggaactggtgcgcttcgacatgcagttgattcagaacccggagatcagcggcgttgaataccagcatggcacgctccagggatacgaggtgcgtgagtacctgctagagaagtggcaccgcacctgcgcgtactgcccagccacaaacgtgcctctacaggtcgaacacatagttcctcgtgcgaagggcggcagccatcgtgtatccaacctcacgctggcgtgcggaccttgcaacacagccaaggggacgcaggatgtgcgcgcgttcctggcgcaagatccgaagcgcctggcgcgcgtgctggcgcaggccaaggctccgcttcgcgatgcggcagcgatgaaattatttacacaagctgagtttgacaacttacctgtcattgacggagtgaagcaatgccctacgggcgactattcttcggttcgtaattttggtgagaggtgcgtcttcggcgcagaatccattttctgtcgggatagccgcttcgccgattcgtgcattttcggcgaaaagagccgatttggcgtgggttgtagcttctgcgatcggtgcgtcttcggtattgggatccgatttgaaatatggtgcaaattcggcttaggatgcatctttggctcagaaacccgcttcggcgattggtgtggattcggagcggagtgcgtattcggcgatcgttgcgctttcggtgtacagaaccgctttggtgagcgttgcatctttgccgggcggcgtgcgcttccggagaatccgctattggttttccccggagctggaacagatgaccgaattgtatatgcgatcaacgtcgagggtggcccctggatcgaaggttggagtttttcaggcggcattgacgagtttcgtgcaaaagttcgagtcaatggcggcggactcaagtcgcgatacctatcggttgcatatgaggtcgctgcgaagtggtgcccggaaaaggtggaatcgtga

SEQ ID NO: 1246 - DNA, 248 bp, Unknown
  Ga0207433_10084486 JGI
taccataacgacgcatcaggagagtacgggactgtttgttgacggggctttttctgcgcaaaccctatgtggcgcgtcctctgattgcgaaacgaagtcgcgttggttgatcagttgcgcgaatttcagcatagcgatgtcgcaaagtcgggttagtggagcgatagaggatgcaatgggtcggcgcaggtcttggttctaggcttcggcgaaaacgccttgcaaatactcaaatcatgtcacgccca

SEQ ID NO: 1247 - DNA, 1404 bp, Cupriavidus basilensis
gtggcagtctttgtgttggataagagcggcaagccgctcatgccgtgcagcgagaagcgcgccagattgttgctcgtgcgccgccgcgcgcgcgtgcaccgcgtaatgccgttcacgatccgcctagtggatcgggggcaggcgaacagcgtcttgcaaccggttcgccttaaactcgatccgggcagcaagggaaccggcgtggccatcacgcgcgaggtcaaggccggcggtgacgagacggctcgggatgttgccgtcctgtctctcgcggaactgatccaccgcggcgcgcagatcagcctgagcctgaccgcacggcgggccatgcgacgtggcaggcgtggccgcaagactcggtatcgtgccgctcgtttcaataaccggcgcaagcccgtaggctggttggcgccaagcctacaacaccgtgtgcagaccacgatggcctgggtgcgccgtttccgggcgctcgcgccgattacagccgtcagcaccgaactcgtccgcttcgacatgcaggcgctgcaaaacccggagatctctggcgtcgagtatcaacaaggcgaactggccggctacgagatccgggagtacctgctagagaaatggggccggcagtgcgcgtactgcgatgcccgcgatacgccgctggaaatggagcatatcgatgcccgggcaaacggtggctccaacagggtctccaacctgacgctggcgtgcgtgccttgcaatcggaagaaggacgcgcgtccgctctctgatttcctgcgcaaggacccggagcgtctcagacgcattctggccaaggcaaagacaccgcttcgcgacgcagctgcggtcaattcgacccggtgggctttgtacaacgcgctgaagaccacggggctttcagtggagaccgggtcgggtgcacgaacgaagttcaatcgccgacgattcgatctgccaaagacgcacgcgctggacgccgcgtgcgttggggtgatcgactcagtttcgggatggcaaaagcccacgttggctatgaagtgctcgggccgcggcgcttaccagcgcacgcgactcaccgcatccggctttcctcgcggctacctcatgcgcagcaagcgcgcattcggctttcagaccggtgacatggtgcgggccgttgtgccgtctgggaagaaggctggcaggcatattgggcgggtggcgattcgcgccaccggctccttcaacattcagaccgccgaaggggtcgtccagggtgtctctcaccgctattgcaagatcatgcaacgcggcgacggatatggttattcgctcgtagcgcaatccacgaaggagagcgggcacaggggcgacgcttcgcgtcgcgcgctatccctcaccggcctgaaggccgatgtttcccgcgcgaactga

SEQ ID NO: 1248 - DNA, 290 bp, Cupriavidus basilensis
gtcaactaccccgctctgaagggcggagcttgtaaaggcaactgaaaaggctcgggttgaccaggcaaagcggtaaccaacccgctacgttgtgaataggtgcaagaccaacgttgggatgcttcctcagtcccaacctcttgaagccccggttgcagacaagcgacagggtaagcacgaaacggatcggggcggatcgccggttcgcaacattgccgaggggagacctcccgaaagggaggcgtcactaggcccgtaagggcaactttttaggagagattgcagtggca

SEQ ID NO: 1249 - DNA, 720 bp, Archaeon BMS3Bbin15
atgcagaagttattgatagagttcaagaacacaccagagaatactcctcaagttctctgctctgtaagtgaggtattaaacagagaggaaactctcaatgtgccctacaaagtactggctgataacagctccgatgaggacttacactctggcaggagtggacaggacttgcgagttcctgtcataaatatgcacaaacaacctttgatgcctacaacaccaagaaaagcaagaatatttttaaaacaaaaaaaagcaaagcaaacactaaaatcagctacatttatgaatatagtaagatggagactggtaaatactctgaagtgtgcatggacttatggctatattacaaaacatgacaggattaagatgaaattggaaaaatctcatgtaaatgatgcttttgtaattgctggtggaacaacccagagcagaagtgtaccatatatgaccacacaaaccagaaggaataataggagtattcagacaaatagaaaaggttttaaacctgctatcagacgacagagatataaattacagcctggcgatttagtaaaatatattaaatatttattcagagtaaaaggagtattcaattatggtaaatgggttagactaatatctttaactaaagcaaataagattattaatgtaaatattaagaaagtggagttggtaaaatatgggaaaggaatccaatttaaaaaagatggaaattag

SEQ ID NO: 1250 - DNA, 250 bp, Archaeon BMS3Bbin15
gtcagtcacccacggctaaagcacgtcttgtcccgtgaggggcaggagcaattggttgattaggaggcattatatatgcagaagttattgatagagttcaagaacacaccagagaatactcctcaagttctctgctctgtaagtgaggtattaaacagagaggaaactctcaatgtgccctacaaagtactggctgataacagctccgatgaggacttacactctggcaggagtggacaggacttgcgag

SEQ ID NO: 1251 - DNA, 1173 bp, Unknown
  Ga0209591_10003844 JGI
atgaaagttttcgtagtcaacaaagatggtcgtcccttgatgcccaccacgccccgcaaagcgcgaatcttactcgaaacagggaaagcaagaattattggtcgcgacccatttacgatccaattaatctacggcagtgctggatatgtccagccgataactctcggtattgatactggttatctcacgattggtttcagcgctgtgagtgtaaaagaagagttgattggtggagaattaagtttgcttccatctgtaagtgaacgcttaactgagcgaagaaaatatcggcttggacgccgaaatcgactacgacatcgcgcttccagattcgataaccggcgccgtccggctggctggttagctccgtcaattcaacacaaacttgatgctcatatcaaactggttgaacggattaaatctcgactacctatcagcaaggtcatcgttgagacggctagttttgatatccagaaaataaataaccctgagattgagaaagcagggtatcagactggagagcagatgggctatcacaacttaacagcatacatacgtcatcgagatggctataaatgccagaatcccgaatgcaatagtaaacccagtaccccaactcaaatccaccatttaggttactggaagtcaaaccctgaccggagtgatcgaccagcaaacctgattactctatgcgttaaatgccatacaccagtcaaccataaacaaggcaaacttctacatggttggaaggctcatgttaaaagcttcaaacccgaaactttcatgaccacaatctatcggcggttgctgaatgttttaggttcaggggaagccttcggttttgaaaccaagttcaaacgagaggaacagaaattagagaagtctcatcacaatgatgctttcgtgattgctggcgggacgaatcagtttcgctccgaaacactggtcttagagcagattcggtgtaacaaacggtcgatggagcaattctacgatgcgaaatatatcgatactcgaacaggcgagaaggtgtcaggtagtcagcttttttctggtcgtcgaactcggaatacgaacctgaatggtgagaacttgcgagtctatcgtggagtgaagatatcactcatgtcagcgtcgaatcaaacgacaacggtatcgattcaatccgaatga

SEQ ID NO: 1252 - DNA, 299 bp, Unknown
  Ga0209591_10003844 JGI
gacaactccacacactgaacgggataccgttgcagtgtgggcttcttaagaaatcaagaagcgtgtcaatagtctcagtaattcatcaagccagaattactacgttatttcagaatatataggcactttgggatataggtttggcagccgagttctagtcccagacactgcggttaatcattaaatattcctacggcgagagggaaagtgtgattagcattaaacctggagtaacattggcgaagaacaccactcgcaagagttaagttatttgttaacttacaacttaaatcatgaaa

SEQ ID NO: 1253 - DNA, 438 bp, Ga0307929_1002028 JGI
atgccgacccatccgaccaatgccaggattatgctcaagcaggaaaaggcccgggtgattcaaagaaccccatttacgctccagcttttgtatgacaccacagaccatattcaagcggtcaccgtggggattgatgacggagggatcaatatcgggattgcagctatttcccacggcaaggttctatttcaacaagaacttcttttgcgctcggatatcaagccaaaatcaaagggcggaacggacaagctgtcaaatctaatgaccttgtgtaaaaattgccatgatcaacatcactcaagtcaatctacgagaagtgatgttaatatgcagaaaccaaacaaccataagccagtagcgccaattcctcctccactgaatcagagattcagaaggggactccttggcggagagttgaatgaggtggtttggtcataa

SEQ ID NO: 1254 - DNA, 366 bp, Unknown
  Ga0307929_1002028 JGI
gtcaactacccctcctgaatcaaagattcataaggggcttgtaaaagcccaagttggctagccgaagtcttaactgactacgttcggcaggatatagatacctttggacgtaatcgccagtccaaagccctatcgtggctctgtaaaagcgctgtgaggtagataaccacattgcgaagcctgctgaacattggcgaggcgaaccttacccctctttacgagggtgataataaccgaaaggtttttttggcatccttcatatgacatccaaagtactttacagtttttttggaaaaagtccctgcaaatggagattgccctaaaaaagtgtaaagtgtttttgaaggatgccgtttttttatgcaa

SEQ ID NO: 1255 - DNA, 1050 bp, Unknown
  Ga0208461_1018587 JGI
atgttagtatacgttttaaataagcatggtaagcatttaatgccatgtaaaccttcaaaagccagaaaacttttaaagcaaggcaaagcaaaaatagtacaaagagaacctttcacaattcaacttatttatggtagtagtggatacaaacagcctattacattaggtatagatgcaggaagtaagtttattggagtgtctgctacaacagaaaagcaagagctattttcagcagaagtagaattaagaaacgatatagtgcaattattatcagaacgtaggcagtatcgtagaagtaggagatatagaaagacaagatatagaaagtcacgatttctaaatagagtgcgaagtaaaaataaaggttggttagcaccttctattgaaaacaaaatacaagtacatttgaaaatagtagaaaaagttcataagatattgcctataactaaaataattacagaagtagcttcctttgatatacaaaagattaaaaatcctaatatagaaggcgtagaatatcaacaaggtgaacagttaggattttggaatgtaagagaatatgttctttggagagataatcatacttgtcaaatttgtaaaggtaagagcaaagacaaaaggttaaatgttcatcatatagaaagtaggcaaataggtggaaatgcacctaacaacctcataactttgtgtgagacctgccacaacaaatatcacaaaggagaactgaaagttaaattaaaaagagggcaaagttttaaagatactgcatttatgggtattatgagatggacgttctataacaggttaaaaaatatctatccaaatgtagaattgactcatggatatataacaaaaaacaccagaattactcataagttgcccaaatcacacagaatagatgctttgtgtattagcggtaatccaacagcaaaacaattagattattggtattacattaagcaggtaagaaaacataataggcaaatacacaaagctaaaatactaaaaggtggtataagaaaattaaaccaagcaccttatttagtaaaa

SEQ ID NO: 1256 - DNA, 236 bp, Unknown
  Ga0208461_1018587 JGI
gtcaactcccccaccctatagagggtggagcttgtaaaagctcaagttgactaccctaagtctttcgaggactacgttatataggtcataacacctacgggcgtttctcctaaccagtagctctgttgcttaactttaaacaatcctgtgaggtagggatagtgagttaaatgtaaaaagcctatataacattggggaaggggacattactccaaaaggaggtatactttatgtta

SEQ ID NO: 1257 - DNA, 1212 bp, Lachnospiraceae sp.
  MISC_FEATURE (920)..(1100): Any "N" represents any nucleotide
atgctatggaaattttacagattgattggaaggacatctgtccgaccaatcagtctggcttaccgcaaaaaggagttatttatgagaccagtatacgtactggacatgaacggcaaaccgcttatgccaacctgccgcttcggcaaggttcggcggatgttaaaatccggcgaggtaaaggtggtggataccttgccgttcacggtccagttggacagaccaacgaagactcatgtggtgcagtcagtaacactcggctgtgaccctggtagaacaaatatcggattggctgcagtccgttccgacggaacggatttataccgatcccattgtgagacaagaaacaaggaaatcgtcgatctgatggacgctcggcgagcagcaagacgggcatcacgtcgaggagagcgactggcgagaaaacgtctggcagctaagcatgaaacggctacaacttttccggacggtcggaaactccccggatacgagaaacccatcatgctaaaggacatcatcaatacggaagcgcgattcaacaaccgtgttcgcccggcaggatggctgacacctacagcaacgcagcttcttcggacgcacctgaatctgataaaacgcatatctcgcattcttccggtatccgatattgcgttggaaatcaacaagtttgcttttatgcagttggacgaacccgacaaaaacaaatggaatatcgacttccaacatggaccgttatacggtaccggtggactgaaggctgccgttcgacagcttcagaacgatacctgtctgttgtgtcaagaaaatgtcattgagcattttcatcatcttattccgaggagcaagcgcggagacaataccatcaacaatattgctggtttatgccagaagtgccatgaagctgtacataaatccgccgatannnnnnnnnnnnnnnnnnnnnnnnnnnnnnnnnnnnnnnnnnnnnnnnnnnnnnnnnnnnnnnnnnnnnnnnnnnnnnnnnnnnnnnnnnnnnnnnnnnnnnnnnnnnnnnnnnnnnnnnnnnnnnnnnnnnnnnnnnnnnnnnnnnnnnnnnnnnnnnnnnnnnnnnnnnnnnnnnnnnnccgccgatacggcagagaagttgtcgaccttaaagaaaggtcagacaaaacgttatggcggcacggctgtgttgaaccagatcattccgaaactcgtggaagaactgggtaa

SEQ ID NO: 1258 - DNA, 219 bp, Lachnospiraceae sp.
gtcaattacccatgactaaagtcacgggcttgcaatagtctgtgatgatttcagagtaattgagcagagcagtgacacattattcgcccggacggtgttccaagcctccggcaccggttagatgtgcctatgctatggaaattttacagattgattggaaggacatctgtccgaccaatcagtctggcttaccgcaaaaaggagttatttatgagacca

SEQ ID NO: 1259 - DNA, 390 bp, Unknown
  Ga0163147_10029708 JGI
atgcaacgtgtattggtgaccgacaaaaacaagcaaccgctcatgccctgtcatccggcatgggcgagagaagtgccccataaggggaaagcggcggtctaccgtacttttcctttcaccatcatcttgaaagaacgtgagggctaccgtcttcgtcagaagcgccatttcggttttcaaacgggcgacatggttaaagccatcgtccctgctggcaaggttgtgggaacgcatagtggtcgcgtggcttgccgtgcgacaggcagtttcgacatcagcacctctttgggaaaagcagccggcgtttcacaccgtcactgccgcgtgctacaccattcggacggttacacttataagaaaggacaaggcgctatccctccccacgcctaa

SEQ ID NO: 1260 - DNA, 479 bp, Unknown
  Ga0163147_10029708 JGI
ataagcatccccacgcctaaaggcggggcttttagccctaatgcttacccgactcagcctcttgcgaggctacgttagcggcgaaactataggcacttcgggatgctacgccagtcccgaactctgcggtgaacgattaaagagaatgcttgggagcaaacagtgtcgttcgcgccaaaccgtcgcataactttgtctaggcgtgactacccaggtataaaaacagaataaaataaacagagaggcatgaagacgtgaagaaaaacaggaaaatacccctcgaaacgtggatgtaggggtggattaggcgcttgtcaatcgttcgttaacatgaaggttcgcgtgccgaatatccacccatttgccgccaacggtcatttcttcctttattatcgaccgtttttcagcctgagcagttacgtctgggcaactttaccccccgtaagggaagaaaagttgaggtaactcaaatgcaacgt

SEQ ID NO: 1261 - DNA, 1122 bp, Unknown
  Ga0137385_10022959 JGI
atggcggtttttgtcctagaccagcgccaccagccgctgatgccttgctcagagaaacgggcacggctcttgcttggtcggcaacgggccgtcgtgcatcggagagcgccttttgttattcgcctgaaagacccgacgcgcgcacagagcacggtgcagccggtcgctttgaaacttgatccaggcagcaagacgaccgggatggccctggtacgtgtccaagagggagaggaaggcgaagtccatcagcgcggcgaactgttcggatgggagattcgctcgtatctgctggagaagtttgggcgccgttgcgtctattgtgggcggggccagatggcctttgagatcgagcatgtggttccaaagagccgaggcggatcagaccgggtgagcaacctcgtgctcagttgccatgagtgcaatgaggccaaagggaacaggaccgccgcagagttcggccacccccaggtgcaagcgcaagccagaactcccctgaaggatgcggcagcgatgaatgcggcacgctttgcgctggtggcaacgctgcggcaggtcggcctacccctcgacacctggagcggcggacgcacgcgctggaatcgggatcgctttgggatcgagaaggatcactgcctcgacgccctatgtgtgggcgagctagcaggggtcgagctccctgccttgtgcatcctgaccatccacacacaaggccggggcagccatcagcgcacgaatgtggacgctgtcggctttccgcgcggctaccgaacgaggcagaagcgcattcgaggtttttcgacgggtgatctggtgcaagctgtggtgcctgctcctctcaagacggcaggggtgcgtgtggggcgggttgcggtgcgcaaaagtggctccttccgtgtaggcaagatcgatgggatcaatgcgaagtacttggccttgatccagaaggaacgcctgcttcctctccgcgaatacattcgggggcatccgcaggcggaggtgggtcaacatgccaacactgctacaacgtatccagcacaggtggcgcgtgaggagccggcgtgtagggacgcgatttatcgagtcctcaaaggtgagcaaggagcccctggaacaggaagatga

SEQ ID NO: 1262 - DNA, 322 bp, Unknown
  Ga0137385_10022959 JGI
gtcaacgaccccacgcgtgaacgcgggggcttggagtgtaactgcaagtccgtcgttgtccagccttagcatccaatggctcaggcagccaggtgcggatgctccgttggatgggtcagggcaccggccaatgccacctcagttggccgctctgccgttggtcgttaatagctcgttcggggtatcgagcggtgcggccagcagctcaagcccatttaccattggcgagaggggttgcctgggtcagccggcccgaggcgcgtcaccagccccgtaagggggtctcgcaagagacagcaagaaaggatcgtccaagatggcg

SEQ ID NO: 1263 - DNA, 1317 bp, Unknown
  Ga0376681_0062128 JGI
atgtcgaacgtttttgtgctcgataccaacaagcagccgctcaacccggttcatccgggccgggcccgtcttttgctcaaagaaggcaaagcggcggtgtaccgcaggttcccgttcacgttgattctcaaccgagccgtcaaggagcctgacctccagctgttgcgggtcaagatcgaccctggcagcaagacgagcgggatggcgctcgtgaacgacacgacagggagggtcgtgtgggccgccgaactgacgcatcggggtgagcggattcagcgcgctctggacaagcgtcgcgcggtgagaaggagcaggaggcagcgcaagaccagataccgcaagccgcgctttcagaaccgccaccagcgcaagggcaccctgcccccgtccttagaaagtcgggtgtgcaacgtgctcacgtgggtgtgccgtctgatgcgactgtcgcccgtgcgtggcattagccaagaactcgtacggttcgatacacaggcgctagaaaacccggatatcgagggcgtcgcataccaacaagggacgctctgcggctacgaagtgcgtgaatatgtcctgctcaagtggaatcaccaatgcgcctactgtgacggacgctcagtcccattggaactggatcatgtccacccagcgagccgacacggctccaaccgcgtgaacaacctggtcgcagcgtgtacatcctgcaatcagcgtaaaagcaatcaggatgtacgcgacttcctcaagcatgagccggagcggcttgcacgcatcctggcgcatctcaaagcgccgctccgagacgcggcagcagtcaacatgacgcgctgggcgctctacgggcggctcaaagggcttggcctgccagttgaatgcggcagcggcggcaggaccaagtacaaccggacggtgcgaggactgcccaaaacccactggtgtgacgcggtgtgcgtgggggcgagcacgccaaagcgtcttgacgtgagaggcgtgaatccgcttcagatcatggcgacggggcatggctcacgacaaatgtgccgcatggacaagtacgggttccctcgtaccggccccaagcaacacaagcgcgtccagggattccagacgggcgacctcgtgcgcgctgtggtaagaagtggcccgaagcagggaacctatgtgggtaaagtggccgtgcgtactcgtggcatcttcaacatcaccacggcgcagggcgtggtcaccgacattcatcatcgtttttgtgtcctcatcgcgcgcagcgatggctatacctatcagcagcgaaaggaggcggcgtttcctccctccgcctga

SEQ ID NO: 1264 - DNA, 305 bp, Unknown
  Ga0376681_0062128 JGI
gtcagagacccgtcccgttgaacgggacgggcttgcgtggagacatgcaggccccgctctgaccagtctcagccaccagccttcttcttcggaagaggactgacggggctccgttggaagcgaatgcataggaacgtccgggtacttcaccagcccggaccccttcgggactgcattaaacaggacgagggagtaagccggtgtgtggtccatctgaaaccgcttcacaacattgacgaggtgagcattaccctggcaacaggaggcccatctgggcagaacaaaaggaacgatggatgtcgaac

SEQ ID NO: 1265 - DNA, 1485 bp, Human gut metagenome
atggatattgcttatgttttggacaatcaaggcaacccgcttatgccaactaaaaggcttggtcgggtgcggcaccttttacaggaggacaaggcagaaattgcttgttataaaccctttaccatccagctgaaatatgaaagcactcactttgtccaagatctatatgtaggtattgatcctggacgaaccaatattggccttgctgtagtcaacggcaaaggtgaagtgttttatgcggctaatgtcactacgcgtaaccaagaaattcctaagctgatgacagaccgtgcgcaacatcgcaaagcctctcgtagaggacagcgattagcacgtaaacgccttgctaagcgaaataatactttaactgagtttcctaatggccgtaagcttccaggatacaaggatggcaatatgccagttaaagacatcatcaacaaggaaagtcgctttaataaccgcaagcgttctgctagatggcttactccaactgcaaaccagtgtgtgcgtactcatataaatttggctaagcacatcaacaagtttatgcctattaagagctggactatggagtacaacaagttcgcttttatgcaactagatgatggctcggttctaggagctgactttcaaaatggtactctcaaaggctatgctagagttgaggattatgtcttcgatatgcaagggggatgttgtgctctttgtggtaagccaatggataaaaataactaccattgccaccatatcgaccctcaaagtaaaggaggcagcgataaggcatataaccgtattggtttatgcgactcttgtcatggacagcttcatcaaaatgaagcatggctagaagagaagggcaaacgcaaaaagtatgcaggaacgtccataattaatattgctatgccttttatatatgaaggtctagtgcagttatttggcgatgataatgtgcatatatgtagcggttttgatacagcccatcttcgcgaatacatgcatatgcctaaagaccattttgcagatgctatttgtatagcctgtattggcgctcatatcgaaccaaagtacgataacgacaagcactttgaaattcatcaattccgttgtcataaccgttcgctcatacactctcaaactgaaagaacttataggtacaaaggggaaatcgttgcaaagaaccgtacccctcgttttgagcaaaagggagactctcttagtcagtggcgcatcaaaatggccaaacaatatggagaggctaaagcccaaaggatggtgtcacagcttgaagtgacaaagtctatgcgccgatacaatagcttaaagagagctatgccagggtctatctttatataccaaggtaagagctttgtattaactggccagctatcaaaaggactatactatcgcgcttttggccaaggcaagaaaaatttccctgctaaggaatgcaaaatcttaggcagacgatcattagtttatgtgtaa

SEQ ID NO: 1266 - DNA, 255 bp, Human gut metagenome
gtcaactactccatcctaaaatgagcctagctcattttcaggatggagcttgaaacttcggttttagttgagcagagacaattacgacacagaaggattaagttctcaaccaccttggggtgtttaccaagcccctcgctctgggcgtatctgtgccgagtctatggtacttttacgttatatcttgttaggcattatgtttgacaagatatggcgcattaaatttatttttatagtggatattgaatggatatt

SEQ ID NO: 1267 - DNA, 1251 bp, Human gut metagenome
atgtgcaacacaggaaggatgtgcattggtattgatactggttcacagcatattggtgttgggattacctgtggagacagagtgattcttaaggatgaacatgcgcttcgttcgtctatggagaaacgttccctgttagcgacaagaacagtaatgcggcgtgggcgtagataccgtaaagtacggtatcgtaagccgaaatggagacatcatacgaaacgcatgtattttgaaaaagcaaaccgcagaggacagcattggagaaaagtaaaaacaaccacacagtcaccaaaactaaaaggatggctgccgccgtcactgcagtcgaagtgtgaccatcatttccgtatcattgaccggtacctgaaataccttccggatcctatcacaagaaatctggtgatcgaggccggtcggtttgatatagcccggatgaatgacccaacgatacatggagagatgtaccagcgtggaccgatgtatgatgcagaaaacctgagagcatatattttcgcaagggataactatcaatgcgcctgctgtaaggcaaaagcggggactacccgtaaggcagatgggacaacagtaaagctggttgctcatcatatcctgttccgcagccgaggggcaacagataatcccaaatacatcatcagtgtatgcgaccactgccatacaacaaaagcacatcaacccggcgggatcctgtattcctggatggaaaacaataaaaaggttgcccgtggattaagggatgctacttttatgaacatcctgagaaagcgtttatttgccagatatccacaggccgcatttacctatgggaatataacggcagctgaccgaaagcagttacgtcttccgaaaagccatgcgaatgatgcggtggctatctcgctgtttgggaaagaggcttctactgtcaagaatatctgtcagactatgcattacaaacagatacggaagtccaaacgctccctgcatgaagcaatcccaaggaaaggaaggaagaacccaaatacgaaggcagtccgtaataagaaaaatacaacacaggcgaatggatttaagttatgggatagtgtacttgctgatggaaagaagctgttcatctgtagttttactggaacaagtgcctacttaattgataaaaatggctgttatatatcacagcccggaaaaacatataaacaatggccattatcaaaactgaagcggttacatcccaatggtaactggctgatggcataa

SEQ ID NO: 1268 - DNA, 326 bp, Human gut metagenome
gtcaattacccaccgcttagatctctaaagagatcttgaagcgggggcttgcaagagccatttgactagcctcagtgattttagtaagtctgtgccgggatgccggaggcagatactgccagatgaactacgttatgagtgtcatgataccgccctgtgaaccctagcagggactggtatccgggcaactgatcatggcgtgggaagccatacagacccgaaggatcaagcctcatgacattggcgaagggaccttacgcagacatgcggcagggacggtttcattccctgtattatgtaagaacagaaaggagactcttatgagt

SEQ ID NO: 1269 - DNA, 309 bp, Unknown
  Ga0400264_0001320 JGI
atgtcggtcttggtactggatagacgcaagcaaccactgatgccgtgcaccgaaaagcgcgcgcggcttctgcttggccgtggtcgggcggtggtggtgcgtgcgtatccgtttacaatccggctgaaaaaccacctgggcaggctggattgcattctaaaacagtgcaaaaagcccttaagagacgcctctgcggttagttcaacccggtgggcgctgtatcagaccctgaagaaaatgggcctgaaggttgaagtgggtactggcggtcgcaagaccggcagtttcaacattcagacaaacagcggt

SEQ ID NO: 1270 - DNA, 295 bp, Unknown
  Ga0400264_0001320 JGI
gtcaactaccccgccttaaatgacggagcttgcagagaacaccctacatgccgggttgaccagggaaagcggacacccacccgcaccgtttatcacaggtcgctaagacccaccgccgaatgcttcctcagttcggcgctctggaagactgggatcacgctggcgaaaggtaaagcgctgaaggttccggtcgccgcgcaagcgggagccggtgatagacattcccgaggggagagaggcttcggcctccgtcacaaggcccgtaagggcattcattgaaaggaaagtaatgtcg

SEQ ID NO: 1271 - DNA, 1332 bp, Unknown
  TB_FS06_10DRAFT_1000002 JGI
atgtctcagaactacgtcttcgtggttgatgcgaagcgtcaaccactcatgccgtgcacgccagggcgtgcacgtgagttgcttaccaagcaacgtgctgcggtcttacgtcgcacaccgttcacgatcgtcttgaaagatcgagtcggtggcggtattcagccgctagatgttaaactcgatcctggctccaagacgaccggacttgccctggttatccacggcaagaacgggtcgcgagtcatctacgcgcttcatctccatcatcgaggtaacgcgattcaaaaagcactccttcagcgacgtagctatcgtagcaaccgtcgcgcgcgtcacacgcgctatcgcgctcgtcgcttccttaatcgcactcgtcgtgacggttggctcccaccatcggtgcagtcgagggtggatcacatcgtgacgtgggtgaagcgacttcagcgcttcaccccactcaatatggtcttcactgaacatgttcagttcgacctccaaagacttaaacatccagaaacacgccacgtcactccaggcacctcagacaccttcgggatggagatgcgtagttacctacgcatggcacataactacacctgtcaatactgtcatggtgcgagcggcgataaacgtctcacctgggatcatatcgtccctcgctcgcgccacggctccgacagcctcgataatgccacgcttgcatgttacacatgcaaccagtctaaatcgaatttatcgatagaggcttggatcgcgtcgctcacgacttccaacgcacaccataccgcgatccgtcagtatgcacccaaggtgcgtgcacagcgtcgcacgctacgcgatgccgccgctgtcaactcgtccaacaacgcgttgtttaaatcgctctcgacgttcgttccgatagtgcgtacaccctcctgggtgacacacatgaaccgaacgtcgttacgtgctcctaaggagcactgggttgatgccgcctgtgtcgacacgccaccctcttgccctatcgacccaacccttaagccccttaacgcccatgccgtcggtcacgtgtcgagacgcatggtgcgcaccgacagttacggcttcccctcaacacgtccgaagggttcatccacccttcgcggtgtccgtaccggtgacatcgtcacttacaccttgatgtcaggtcgtcgtcaaggtgtcacggacacgtcacgcgtgacttcactcgtacatacgacaaggtctctacgcgtgacatacggtgggatgtcgatcgacatcccgtcatcctctccgatcaccgtctgttcaagaacagacggttaccgttacactcactga

SEQ ID NO: 1272 - DNA, 299 bp, Unknown
  TB_FS06_10DRAFT_1000002 JGI
gtcagtgagtgatctatcagtcagggtcttccctgaccctgactgatagatggatccttacggatccttgatgaccagactcagtgcacgcaaatgcactacgttcagcaggtcatgacaccggaggatgtctgatccagtcttccgctctgtcgtgtgtcattaaaagagatgagctcaacgtctcggtgtgacacacacgacaagcctgctgaaccttgtcgaggaccactttacacgcaagtgtgtgaggtaactcacagtgtttttataggaacctctttatgtctcagaactac

SEQ ID NO: 1273 - DNA, 1191 bp, Unknown
  Ga0206350_10291578 JGI
atgagcaaagtttttgtagtagataccaacaaacagccattaaatcctgtcaatccaggacgagcaagagtactacttgacacagggcgtgcggcaatcttcaaaatgcatcctttcagtataatcctgaaggttgccatagaagatcccattattgcagagttgcgcatcaaacttgatccaggctcaaaaacgacaggcatagccatcatgaacgacgcaaccggagaggttgtttttgctgcagaactctcccacagaggacagcaaatcaaatcagatctagacgatcggcgtggtgtgcgtagaggcagacgaaatagacacacacgctatcgccagcctcgttggcagaatcggaaacgaccagaaggttggttgccaccatctctgcagagccgaatagccaatgtcatcacttgggtacagcggcttgcaagagtctgtcatctcacaaacattagtctagagcgtgtcaagtttgacatgcagtttctagaaaatccagagatctcaggcattgagtatcaacaaggaacactagcaggatacgaagttagggagtacttgctagagaagtggggacacaaatgcacctattgcggaaagcaagatatccaacttcagattgagcatataattccccgtgccaagggtggttcaagccggatctcgaatctctgccttgcctgcgagaagtgtaacagagccaagggaacgaaggacatcaaggacttcctcaaaaagaagccagaactgctcttaaagatcttagctcaggccaaagctccacttcaggatgctgcagcagtcaactcgacacgcaaagaattgcatctgagactagaagctctgggattaccaatcgagtgcggatctggaggactcaccaagtacaaccggactagacgtgagcttcccaaaacacactggatagatgctgcatgtgtgggcaagagtactccagagtgcatcgaaatcaggggtgttgttcccctagcaatcacggcctatgggcacggatcgagacaaatgtgcttgatgaacaaatacggcttccctcgcacagacccaaaggagaaacatcccaaacacggatttaagacgggcgatatggtgaaagctatcgtgccacatcatctcaagcgtgctggtacgcacattgggagaatgtcagctaaggcaagcgga

SEQ ID NO: 1274 - DNA, 280 bp, Unknown
  Ga0206350_10291578 JGI
gtcagggacccgatcccctaaaggggatgggcttgcagtaatccttcggggttgctccgagcttcacctgtccagactcagctagataactagctacgttagaggcgaaattaggtaccagagggtgcgaagccagcccgatgctctacggttgcaggttaaacaggattacaagggttagtgccagtgcttgcaacgtcaaaccgctttctaacattgtcgaggctaccatcacctacgaaagtagaggctccttggagcaaacaaaaagatgagcaaa

SEQ ID NO: 1275 - DNA, 1362 bp, Janthinobacterium sp.
atgggtatttttgtactggataagaaaagccggccgctgatgccgtgcagcgagaagcgggcgcgcaagctgctcgattgccgccgtgcgcgggtgcacctgctgttcccgttcagtatcggcctagttgaccgtttgctggaggacggagtcctccagccgctgcgtctgtccgatgatccgggcagcgtcaccagcggcctagccgtttgccgcatcgaagaaggcgatgtcaacgacatgagcgatgccgctggcattaatgccccggtcatgcacatcctgtgtttgatggagttggtgcaccgcggcccagccatcaagaagtcgctgcacgcacgttccagcatgcgccggcgccgccgcggcaatctgcgctaccgcgcgccgcgtttcaataaccgtacccggcgcaaggtatggctggcgccatctctgcagcgccggatcgacaccaccatgtcctgggccgcgcgccggcgccgtttggcgccaatcacgcacctggcgcaagagcgggtgcacttcgatatgaggaagatggaaaatccggagatctgcggcgtaaggtatcagcagggtacgctattgggctatgagatgcgcgaatacctgttggataaatttaaccgcagctgcgccgattgcgatgcaaccggcgtgccgctgcagatggcgcacatcgacgccgaggccgatggcggctcgaatcgcgtcagcgacctgacgctggcctgcgacccatgcaacaagaatgcacgcgatatccgcgagtttcaaaagaaagacccggtgcgcctggcgaagatcctcgccaaagcgaaggcgccgctacgcgacgccgcagcggtcaatgccaccaggtggacccggttcgaggccctcaaaaagaccggccttccggcagaaactggcggcgggcacaccaactggagccgctcgcgtctgggccttccaaaaacgcgcgcccacaatgccgcctgcgtcggcattgtgggcggcataggcggcacgcgtgcgccgaccttgcgcgtcaaatgcaccggctgcggctcgcgctgcaagacgcgcctgaaccaatatggattccggcgtgccgacctaccctccggcaagggtatccacaagggccgcgtggcgctccgaatgacgggtaatttcaacatccagaccggcatcgcccacgcgctgacggttcggggcttctcacaaaagcattgcagtgtcattcagcgcgcagatggttatggctatgtctggcaaaaagcaattcaactatcaaatttaagagctccgagcgcttcgcggtcggctcctgccctccccgccgtgaacgccggggtatctcggagcaacatctga

SEQ ID NO: 1276 - DNA, 288 bp, Janthinobacterium sp.
gtcaacgacccgccctaagggcggagcttgaaaggcgcaagcctcgatcgttcaggttgccccggaaaagtgccaagcaagcctggcacttgcaagtaggtacaggagcgacgccggtatgcacgaaacggaccgtaaccaggcagcaaaatagcgttgccatagccggattacaacattttccaagaatggcggcgccgtcctcaagggcggcacccgacatcgggcgcgtaagcccacgccggtcgcagattttgcggccggcaccaaccaaggagtcgcatgggt

SEQ ID NO: 1277 - DNA, 1659 bp, Streptomyces regalis
atgactacgtttcccgcaggcgagcagacccaccaggctgtgcttcctcagcagcctgctctggaatccgtgggagcagacacccctgggagcagggacgaaacggctcacggacaccccgccgccgcgcggggcgccggcagggaacatgggcgaggggagaccgacgggcagggcaccggagcctgtcggcgtcacgccaagcgcgctgccacggcagcgaaggcggcagagaacgggagcggtgacgctcccccacatgagcagtcgtacgacggtggcgtgggcgaaagcagagtcttcgtactctccaaggaagggcaaccgctcatgccctgccaccccgcccgcgcccgcgaactcctcggcaaaggacgggccgtcgtcgcccgacaagtgcccttcaccatccgcctcaaagaccgcacgctggccgactcggaagtcgacggcgttcagttacgcatcgaccccggctccaaaggcaccggcctcgccctcaccgacgagaagaaagaaaccagcggacaaggcaccacagtcagcatccggcgcggactggtctcagtcgaactccaacatcgcggcgaccagatccacaagtgcatgcaacagcgcgccggctaccgacaccgacgacgctccgccaactgccgctaccgagcccgcagatcgaacaaccggacccaccccgaaaggtggctaccaccctcccagcgccaccgcgtcgacaccaccttctccatggccagccgcctctgccgctacgcacccgtcaccgagatacacgtggaattcgtcgccttcgacacccacagcatgagcgcaggcagacccctcaacggcgtcgagtacgggcagggaccactcgccggaaccaacactcgcgcctacctgcaagcccaatggaacaacgcctgcgcctactgcgacgccaccggcgtccccctcaacatcgagcacctcacaccccgcagccgaggaggctcgaaccgcatctccaacctcgtcctcgcctgcgtcccctgcaaccgggccaagggcagccaacccatcgaggtcttcctcgcccacagacccgaccgcctcacgaaaatccttcagcaggtcaaggcacccctccatgacgccgccgccatgaacgcgacccgatggcagctcatcgaggcactgggcaccctcggcagaccggtgcacacctggacaggcgaaggcaccaaggaaaaccgcaatgccatggggctgaccaagacgcacaccctggacgctctgtgcgtcgggcctctcgatcacgagagcggcgacgcgatcgtacggttccccgagcaggtcctcgtcgccaaagccaccggacgcggctcctacacccgcaccaccccggaccgctacgggtttcccaggctgcggcgcgcccgaaccaagcagcacttcgggtatgtcactggagatctcgtacgtgctgtcatgcccatcggcaagtgggcagggacctggaccggccgcatctcggtgcgagccagcggacagcacagcctcacgacgccgatgggcagattcaatgtctcccactggaatctgcggcttctgcaacggggcgatggctacggctacagcacgcgatcggaatcgccacagtcaacatctcgaaaaacccgttga

SEQ ID NO: 1278 - DNA, 304 bp, Streptomyces regalis
gtcagctgcacatacgagaagggaggccactcgctccccgaccacaaggtcgtcgagtgaccagccccagtcatcacgatccacaggatcagggaggtgccccgatgactacgtttcccgcaggcgagcagacccaccaggctgtgcttcctcagcagcctgctctggaatccgtgggagcagacacccctgggagcagggacgaaacggctcacggacaccccgccgccgcgcggggcgccggcagggaacatgggcgaggggagaccgacgggcagggcaccggagcctgtcggcgtcacgc

SEQ ID NO: 1279 - DNA, 348 bp, Sulfobacillus thermosulfidooxidans
atggtttttgtgttagacaaacatcaaaaaccgctgatgccgtgttcggaaaaacgggcgaggttgttattggaacgtggtagagcgcgtattcacaagatgtatctcgcgtgtcatgcgtgcaaccaagaaaagggtccgcgaacggctgaggaattcgggtatcccgatatcccaatccaagcccgacaccccctcaaggatgcggcgatgatgaacgcgactcgctggcggttgtacgaccagctcaaggctacagaactttctgttgaggggagatcgggggcacgcacgaaaatgcaacggattcagcacaacctcccgaaagaacactattatgatgcctga

SEQ ID NO: 1280 - DNA, 268 bp, Sulfobacillus thermosulfidooxidans
gtcaaccaccccgccctgaagggcggagcttgtccaagctccatgggttgaccagtctcagccaggaggtctgagacctcatcgggcttcgttcgttgcgtcatgacaccctggggtgcttctccagctccaggctctgtcgcccgcgattaaaagcgagcttagggtagtgcaagcggtgtggcgggctgaacaagcggaatgaacattggcgaggagagacttttttaagcgttacgagtcccgtaagggaggatattatatggtt

SEQ ID NO: 1281 - DNA, 2310 bp, Unknown
  Ga0209615_100317 JGI
ttgccaccgggcaagcaaaggcccatctgtagtccaacatggtcgaggggagcggcgccgcaaggcgcccgtcacaaggcccgtaagggcatacgccgggaggcgcacagtcgtagccgcgttgactcaagcgcggttgtttgggatagcaaaaggttgagagcgatcatggtttttgttctggatcgaaatggcttggcgctaatgccgtgcagcgaaaaacgggcgcgactgctgcttgcccgtgggcgcgcgcgtgtgcatcgcgtgctgccctttgcgatccggctcgtggatcgcaagcaaagcgactgcgaattgcagccgctgcgcctcaagattgaccccggcagcaagagcaccggcatggcgttggtgcgcgaggttgagcacgttagcgcagccactggagaggttacacgagaagttgcagtgctcaacctgtttgagttggtgcatcgtggtcgccagatcagcgaggcgctgacagcgagacgccagatgcgccgtgcccgcagggggcgcaagacccgttatcgcgctgctcgctttctcaatcgcaccaagccccaaggctggcttgcgcccagcttgcagcatcgagttgacacaacgctggcatgggtcaagcgcctacagcgctgggctcccatcggtggactctctcaggagttggtgcgctttgatatgcaaaagctcgaaacccctgagattgctggggtcgaataccagcaaggcacgcttgcgggctacgaggtgcgcgagtacctgttggagaagtgggggcgcgcttgcgcttactgtggcgccaaagatgtgccactgcaaatcgagcacattcaaccccgagcgcggggcggcagcaatcgggtgagcaacctcacgctggcttgccagtgctgcaaccaagccaagggggccaaggctgctgaggatttcttgtccaaaaagccggatgcgctacggcggattctggctcaagccaagcgcccgctaaaggacgccgcagccgtcaattcgacccgctgggcgctgtttcaggcgctcaaggataccgggctgcccttgagcacgggtagcggtgggcaaacgaagttcaaccgcacgcgcctgcaagtgcccaagacgcacgcgcttgatgccgcatgcgttggacacgttgacgcgctgcgcgactggcgcaagccaacgctgaacatcaaatgcactgggcgcggcagctaccagcgcacgcgcctggacaagtatggcttcccaaggggccacttgaccagagccaagcgcattcacgggtttcaaaccggggatcgggtccaggcagtagtgggttctggcaagaaggctggcacccatgtggggcgcgtggctgtgcgctccagtggcagcttcaacatccaagccggcagcggtttggttcaaggcatctcgtatcggcactgcacgctggttcagcgcagtgatgggtacgggtatttcaatcaaccgatagcacaagacagggataaccagatgaagccttttttgaagtgggcgggcagcaaatataaaataatcgatcgcattctgaaaacacttcctaatggaagacgattgattgagccatttgcgggatcgggggcggtttttttaaacgtcgattttgaagagtatctgatcgccgatgcaaacgaagatttaataaatctttacaagcaagttcagacgaacgggaaggattttgttgcctatgcttcagccctgttcacacctgagaacaacaccgaagccgcattctatgaactacgggcagaattcaatgcatgtacggaacccgccaggaagtcggtgcttttcgtttatttgaacaggcattgctttaacgggctgtgtcggtacaactcaagagggcaattcaatgttccttttgggcggtacaccaaaccagtcttcccaaatgttgcgatgcttaacttccatgaaaagagcaagcgcgctgtttttgaggttgcagacttcaaggtcataatggaaaaggccgacatcggctcggtggtttattgcgatccgccttatgcaccattaaccgcaaccgcgagttttagcagctacgccaaagacgggttcacactgaccgaccaacaggcgttagctgattgcgccaagaaactcattgctcgcggtgttcctgtagtcattagcaatcacgatacggagtttacacggtcaatttactcggaggctaaaatcacatcttttgatgtacagcgctttatttcaagtgatgcaagcaacaggaataaagcagccgaactactcgcactctatggttaa

SEQ ID NO: 1282 - DNA, 304 bp, Unknown
  Ga0209615_100317 JGI
gtcaatcacccctccctaaaggaaggggcttgagggagcaatcctgatggcccgaggttgaccagaccgcgaaaggagattttctctaatcaccgttggattaaagaccgcagactcacccagggatgcttcctcagtccctggctctgaaagtggcaactgcagacacgcttcgggtaagcacgaaacgggttgccaccgggcaagcaaaggcccatctgtagtccaacatggtcgaggggagcggcgccgcaaggcgcccgtcacaaggcccgtaagggcatacgccgggaggcgcacagtc

SEQ ID NO: 1283 - DNA, 459 bp, Unknown
  Ga0394881_0001061 JGI
gtgcaactagcccaacaagctcttaaaccattggcgaagcgaacattacgagaaatcagaagagacgcaacaatgtctaattttgtctttgttcttgataccgaaaaacgaccgctgacatcctgtaccgcaggtgtggcaaggtcactcttgaaagctggaaaagcggcgatttatcgtcgttatccattcacactcattttgagcaaaacggtagcggcaagtcctaaaccgctagaactcaaattagatccaggttcaaaggtgacagggattgccatcaaacaaggcaacaaagttatctttggagccgaattgcagcaccgaggacaccagatggttctctgccgcgcatcaggcagttttgacatcgccacaaccaatggaagagtggcaggaattagccacaaatattgcaaaccaatccacaaaaaggacggttattcgtatggattctga

SEQ ID NO: 1284 - DNA, 262 bp, Unknown
  Ga0394881_0001061 JGI
gtaaactgcccggttctatgcctgacggcaggctagcgccaaccagcgggatacaagccacaacatgaccagcctcagtctttcgaggactacgttttttgagtcatgacacccaagagtgcgtcgctagttcttggctctgtcgctagttgttaaacatctgtagtgggttaaggaagtgcaactagcccaacaagctcttaaaccattggcgaagcgaacattacgagaaatcagaagagacgcaacaatgtctaatttt

SEQ ID NO: 1285 - DNA, 1668 bp, Desulfovibrio sp.
atgcttcctcagtcccggacaatcgaagcccggatggcagacacggcgggtcggccacgaaacgcgtccgggcagacagcggctagaacatgcgggaggcataacgccgatcaccgcatagcccaacatgcccgaggggagcgttccggaaaagccagcccggagccgtcacgggagaaggcgcaagccgactcccagcagggaagcgtaagctcccaaatcaccaactatcccaagcaccgcgaagccgccgtgctcgtcctcgacaggcacggcaagcctttgatgcccacccatccggccagggccaggaagctcatgaaagtcgggagggcgcgcattcacaaacagtatccgttcaccatcaggctgatcgaccgtatccttgaagagtccgccgtccagccgatccgcctcaagatagatcccggctcgaagaccaccgggatgtgtctagtccgcgaggaagtcaaaacggacggcactaccatcgtccaccatgtattattccatctcgaactcactcaccgcggccagaagatccgcaaatccatactccagcggaaaggctatcgccgccgtcggcggtcagtgaacctgcgctaccgggggcctacgttcgacaatcgcaccaagccggaaggttggctgccgccgtcgctgcgttcccttgtcgacaacgtcatgtcctggaaagggcggctgtccgggttggctcctgtgtccgccgcgactgtcgagcgggtccgcttcgacactcaggccatgcagaacccggagatctccgggatcgagtaccagcagggcgagttggccggatacgagatccgcgaatatttgctcgaaaagtggggccgcaagtgcgcgtactgcggggcagtgcatttgcctttgcaagtcgagcatatccaccctaaggccaagggcggctcgaaccgcgtgtcgaacctgactctggcctgccaaccgtgcaacgaagcgaagggatcgatgcccgttggggagttcctggccgaccgcccggacgtgctggagcgtgtgctggcccaggccaagaccccgcttgcgcgacgacgcggcggtgaacgccacgcgcaacgccatcttcttcgcgctgcgggagaccggattgccagtggagtccgccactggcggcaggaccaaatacaaccgctctcggcttggcatccccaaggcgcactgtctggacgcggcctgcgccggacaagtcgaccaggtgatcggctgggacatgcctgtgctgtcgatcaaagcaactggacggggcgcatatcaacgcaccaatgtttacgccaatggcttcccacgcggctatctgacacgggagaagatggcgcggggcttccgcaccggggacatggtagttgccgatgttccgaacggcaagaaaatgggccgccatatcgggcgtgtagcggtgcgggccagtgggtcgttcaacatccagaccaagcacgctgtcgtccagggcatcaacgccaggcattgccgcctgctgtcgcgggccgacggctacggttacgcccggcatgcctcgcccatcctccaggaggccgcatgacaacgctggccaaatattcccgcggactcgccgtccgcattcctccccgccgtgaacgacggggcctcctgcggaggtttggttga

SEQ ID NO: 1286 - DNA, 289 bp, Desulfovibrio sp.
gtcaatgatccctcccttcagggaggggcttgctgagggagaccttggcaggcccgtgttgaccagggcaagttgtttgagtttggcaaacgttagaggacaactacgttgaaattggcgctaaacaccgactccgggatgcttcctcagtcccggacaatcgaagcccggatggcagacacggcgggtcggccacgaaacgcgtccgggcagacagcggctagaacatgcgggaggcataacgccgatcaccgcatagcccaacatgcccgaggggagcgttccggaa

SEQ ID NO: 1287 - DNA, 1098 bp, Unknown
  Ga0394874_0001047 JGI
atgttacgagtaccagttttatcaccatcaggcaaaccattaatgccaacgaaagctagtcgtgctagacgttggttgaaagagggaaaagcacgggttgtgtacaacgaccttggtatttttcaaatccaactacttagatgccccagaactcagaacacgcaacctattgcagttgggattgaccccggtaaacattacacgggcgttggcgtgcagtctgccaaatttactttgtggttggctcatttacaactgccattcaagacggtgcgggaacggatggagcaacgtgccatgatgcggagagggcgtagaggcagacgaattaaccgcaagctaccttacaatcaacgcgctcatcgtcaaaaacgatttgacaatcgtagaagtaaaaagttgcctcccagcattcgagccaaccgcgaattagagttgcgagtagtagacgaattatcgctgatttacccaatcactacaatcgcctacgaaatcattaaagcgcgtggtgataaaggatttagtcctgtgatggttggtcagaaatggcagttcgagaacttagaaatttattgccaagtgcagcaagttgaaggctggcagaccgcaaacatcagacagcaattaggattgcacaaacaaaaacattctaagggtgatgcaattcctgctactcatgctgcagatggtgttgctttaggtgcaagcgcgtttattcgatatggcatcacttctacccattcaatgggttggaaagggagcgtaactataactcctgcaccctttaccgtaattcgccgtcccccggtatcgcgtcgtcaactccacctcatggttccaactaaaggtggaacgaggagaaaatatggcggaactgtgacgcggcatggattcaggaagggtgatttggtcaaaacacctaacggtgaaattgggtattgcagtggtgataccgaaaaagctttgtcagtcagtgacgctgactggcgtagattggggcggtttagccctaaaaaatctcagttggtacagcgaaacacgggattaatcgtgttgccaactaagagattgtctaatctactggcatcgagccagtag

SEQ ID NO: 1288 - DNA, 222 bp, Unknown
  Ga0394874_0001047 JGI
gtcaataaccccgccctgaagagggacggggcttgtaagaaccaaatcttacgtgtttgactagcccgttgagtctaatcctggcacgcacttctgaatacttccccagttcggacacattgcaaggctgtttggtcagtcgttggttaaagccaagtcatcttggattaggtgggcgaggggacttaatactttactcggaggtttatcaccatgttacga

SEQ ID NO: 1289 - DNA, 816 bp, Unknown
  Ga0376669_0038378 JGI
atgccatgtacacccgccaaagcacgccacttgttcaaaagtggtaaagcaaaaccaaagcgtaacaaacttggattgttctctgtgcagctctgctacgaacaggagcccgacaaccagcccttagttgccggtgtcgatccaggctcaaagtttgaagggtatagtgtcgttggctctcaagacaccgtgctcaatctgatggtggaagcgcctgatcatgtcaaagacgctgttaagacccgtaggactatgcgacgggctagacggcatcgcaaatggagaagacccaagcggtttgacaatcgcctcaaccgcaagaagaggatcccaccatcgacccgaagtcggtgggaagcaaaagcacgcgtgattgctcaactcaaaaagatcatgccactgactgatgtggtggtagaagatgtttgtgcagaaacacgcaaagggaatggtggaaagtggaacggctcgtttagtccgatacaagtgggcaaagagcatctctatcgccttctcgtcgagatgggattacatgttcacttgaaaggaggatatcaaacaaaagagttgcgagaaaagtacaagctcaagaagacgaagagcaaatcgaagcagtcctttgactcacatgccattgacgcttgggttatggcagcatcagtgagtggtgctcctcaaccgacttgcacacgactctcctacatcgttggtgctcagctccacaggcgtcagatccatcgtttgcaagcctcaaagggtggcgagagaaagccctgtcagggacccgatcccctaaaggggatgggcttgcagtga

SEQ ID NO: 1290 - DNA, 252 bp, Unknown
  Ga0376669_0038378 JGI
gtcaggaacctcatggctaaagccaggggcttgagaaacggctagctcaacgtaagttcctgtctagcgggctctcttttcggagggagcagtagcgtatccggctaaggaaagcatgtccgagcgccaccctaactcggaccactgcctgccacgccgaagcagacgaccggaggggtctatgccggataggccatcgcgaagggtcatcttaaccctagcagtgactaggagaagggaaatcccttgaga

SEQ ID NO: 1291 - DNA, 969 bp, Unknown
  Ga0334819_000080 JGI
atgcccaccaccaattggcgggcgaacgagctaatccgtaagggcaacgcgttacgacgtttcagcaagggcgtcttctacatccgcctgacgcaacggtctgacggggtcatacaggaagttgcgtgcgggatagaccccggctcgaagaaggaagcgttcacggtaaagtcggatgcccacactttcatcaatattcaggcggacgctgtgacttgggtcaagaaagcggtggaaacccgcaggttgctgagaaggtcaaggcgcagccggaatacaccttgccgtcagaaccggtccaaccggacaatcggcggaattccgccgagtaccagggctcgattcgggtggaaggtgaggattagcacctggctctctaagctctatccgatttcccgctttgtggtcgaggacattaaggcgacgacccacaagggacgccgttggaataagagttttagcccactcgaagttggcaagaagtggttcaaggtagagcttgagaagctcgctccgatcacactcaagcaagggtgggagacattccagatgcggaacgcagcggggttgaaaaagacgaaggcgaagatgtcggagaggtttgacgcccactgtgtggacagttggatcttggcgaacagttgggtcggcgggaacatcaagcctgacaacgaaaagatgtggctggtaacgccgcttcaattcagccgtagacagcttcatgttcagaatcccgccgcaggcggtatccgaaagccctacggcggaacgcggagcctgggcttcaagcggggaagctgggtacagcatcctaagtttgggacgtgctttgttggcgggtcgtcaaaaggcagagtcagcctgcacagcctttcgaccggaaaacgcttaacccagagtgccaaatctcaagatatggaatttctgcattatgcaagctggagggcgtccaattcctccgctggctaa

SEQ ID NO: 1292 - DNA, 205 bp, Unknown
  Ga0334819_000080 JGI
gtcaatgaccgtcgcctaaaggcgacggcttgtgcccaaggccaagccaaggttgaaagcacaacgtaagcggagactagggatgtagtaactgagcttcctgggcgtggcagcccgaaagcacaccgagaatgctccccaagttttcggtccctgcggaagccagtcccgaagggggaaattgagaaagagagaggtaactctt

SEQ ID NO: 1293 - DNA, 1419 bp, Unknown
  Ga0172381_10002433 JGI
atgaaaaaagtattcgtacttaacaaaaacggagaaccgcttatgccaaccgaaaaatacggtaaagttaggcgattaattaaagatggtaaagctgaaattttttcgcatgaaccatttactattaaattactatatgatacaccagaattcatacaaccaattacacttggtattgataccggttattcattcattggaatttcagctttaacaattaaagaagaattgtttggttgtgaattggaacttcgtaatgatatcaaatcattgatatctgataaacaacgatgtcgtagcttacgaaggagtagacttagatatcgtgcaaagcgattcgattttagaactagaaaagataattggttaccaccatcaactcaacacaaatttgatactcatatcaaacagattgataaactaattactagattgccaataactaaaattatattagaaacggctaattttgatattcagaaaattaataacccattaattactagtgttgaatatcaacaaggtgaacaattaggatattggaatattagagaatatattctccatagagatgaccataaatgtcaaaatccagattgtaaacataaagacgataaaaactataaaccggtattaaacgtacatcatattatatatagacgtaatggtggttcagataaaccaagtaatttaataacactttgtgaaaaatgtcatacagctaaaaaccatgaaaaaggattcttagtagattggcaaaaaaacggttttaaagttaaaggttttaaagattctacatttatgaatattattaaaactagaattcttaatcaattacgagaattatatcccaatatagaaattactaatacacacggttatattactaaagctaatagaattcataataaaattgagaaatctcaccataacgatgcttttattatagctggtggtactgacaaagataaaatatctgaaactattaatcttaagtgtgaacgtagaaacaatagagcattacaaacatttagagatgctaaatatattgattcaagagatggtgaaataaaaaccggatatgtattaaattctggtagaacaaaacgaaataaatcgactaatggtgaaaatttgagacaatatagaacaccaatattaaatccagatggaaccagaaaacaagttaccaaaggtaataatagtattagaaaaactcgttataatttctcgaaaggtgctaaaattaaaataactgaaaattggtctggtaaacatttaagtgttaataaaaaccaaattcttattagtggtggcacagctaaccaaggtacatatatctatataggcaaaaatcttataccagcaaaagtatgtaaagaaataactaatagaaaaggtataatagaaaaattataa

SEQ ID NO: 1294 - DNA, 262 bp, Unknown
  Ga0172381_10002433 JGI
attaaaaacataccttatttttaaaattgagaatgaagttctcgatgattacaattatgactcagggaaacctacgttatttaagtcatcacacctacggtgctccactagcctgtagcaatgtgttacccgactaaacatctctaaccctatacggagaagtggaaggtaaattacaagcttttataacattgtcaaagtggaccacagggtttcgaccctgatttatttattaatttaaattaaaaacaaaatgaaaaaa

SEQ ID NO: 1295 - DNA, 693 bp, Unknown
  Archaeon IPdc08 DNA, NODE_102_48, whole genome shotgun sequence; GENOME_ACESSION: GCA_006538205.1_ASM653820v1_genomic
atgcagaagttattggtagagttaaagaacacatcaggagatgctcctcaagttccctgctctgtaagtgaggtattaaacagagataaaagtctcagtgtgccttacaaagtactggccaataacagctccgatgaggacaaacactctggcaagagtaggcaggacttgagagttcctgtgttaaatatgcatggaaaacctttaatgcccatgagacctagaaaggcaagagttttccagaaacaagaaaaggcagcagtagttcagcgaagtccttttaccatacagttaagacacccttcaggcgaaacaaaacaagctttaaaattgggtatagatgctggatattcaacaataggctttagtgttataagtgacaagagtgaattactctacagtgagttaaccttgagaaaaagaatttctaaactcattgagcagaaaagaaattacagaaaaacacgaagaagtagattatggtatagaaaaaggcataagccctctgtaagaagaaagaggtataggttacaacccaatgatttagtgaaatatattaagtctctatgtaaagtgaaaggtgtccctaattatggggaatatgtaacattggtgaataaaatagggaaaatatgtggtattaatgttagaaaaatagagatggtcaaatatggtaaaggaatacaattctaa

SEQ ID NO: 1296 - DNA, 253 bp, Unknown
  Archaeon IPdc08 DNA, NODE_102_48, whole genome shotgun sequence; GENOME_ACESSION: GCA_006538205.1_ASM653820v1_genomic
gtcaatcaccacccattaaaatgggtggcctgcctcgtgagagaccagggtaacaggttgattaggaggcattgaagaatgcagaagttattggtagagttaaagaacacatcaggagatgctcctcaagttccctgctctgtaagtgaggtattaaacagagataaaagtctcagtgtgccttacaaagtactggccaataacagctccgatgaggacaaacactctggcaagagtaggcaggacttgagag

SEQ ID NO: 1297 - DNA, 819 bp, Unknown
  Ga0376652_0002900 JGI
atgagcaacgtctttgttttagataccgatctcagacaactcaatccagttcatcccggggaagccagaatattgctctcatcaggaaaagcagcagtttacaggcgttacccctttaccattgtgctcaaaaaggctgtagagacacccattgagcctttacgcatcaagatcgatccagggagtaagaccaccggcatagccatcatcaacgatcagactggtgaagtcgtcacggcttttgagctttctcaccgtggggaaacaatcaaagcacgcctggacaaacggcgtacggtgcgaggaagcagacgcaaccgccataccagatatcgcaaaccaaggtggcagaaggtaactggtgtctacccgctgctcatcacggccaatgggcacggtcgcagaagaatgtgttctgtcgacgagtatggcttcacgtatggcaatcccaagcaatctggacgcaagtacggcttcaaaacgggcgatatcgtccgtgccgttgtgacagagggcaagcctattgggacctatgtgggacgtctcactgcacgagcgactggatcattcaatatcacaaccaaaaaggggacaacgcaaggaattggataccagtattgccgtgctcttcatcgctcggatggctacagttaccagaaaggagctgccattgttcttgcccaatcagaatcagaggcggtttctgcttcctcccaaccatccgttcagatagaagagtgccccggtgtaagagccccaagaaaggaaggcctctttcctccccttagcggcgccgcaaggagtatccagaggccataa

SEQ ID NO: 1298 - DNA, 272 bp, Unknown
  Ga0376652_0002900 JGI
gtcagggaccctatggcttttgccaagggcttacaggaatccgaaaggattcttgtggcttcacctgaccagactcagcgcggaggcccgtcctccgaagctacgttaggagcgaaataggtacgttgggatgcgtgggccagtccccaccgctacggtgaagggttaaacaggattacaagggttagtgccagtgctcttcacgttaaaccgctctataaccttgtcgaggcccccattacctacgaaagtagaggctcacgatgagcaac

SEQ ID NO: 1299 - DNA, 1338 bp, Unknown
  MLSBCLC_10010460 JGI
atggcagtatttgtattaggtaaagatggcaaaccattgatgccttgcaatgagaaaagagcacgattgttgttagcaaaaaatcgtgcagttgtaaaacgcgttaaaccgtttgtaattcaactaaaagacagggatcagaccaactgtgaattacaagacctagaagtcaagattgacccaggtagtaaatttacaggaatctgtctttctagaacagagaatagagtagtcaacgttttaaatctatttgaattagaacacagaggacgactaatttctcgcaagctaaaagccagagcagcaatgcgtagaaatagacgtaatagaaacacacgctatcgcaaagctagatttctaaatcgtgctaaacctaaaggttggttagcgccttctctgatgcaccgtgttgaaactacgatgagttggattaaccgacttattcggtggtcacctgttgaatctttagctttagagcgtgttaagtttgatatgcagaaaatgcaaaatgctgatattcagggaacagaatatcaacaagggacattgttcgagaaagaggtaatggaataccttttagaaaaatggaaccataaatgcatgtattgcggtattgaggatgtttcatttgaaaaagaacatcttatccctcgcagtagaggcggtagtaaccgcatatctaatttaggtttatcttgcaggaaatgtaatcaggctaaaagcaatttaactttgaaagaattcttggttaacaaacctgaattactaaagaaaataaaagctggtttaaagcgacctttaaaagatgctgctgctgtaaatgcgactaggaataagcttttggttgaaatgttgaaaaccggtttatctgtagaaaccggaactggtgctcagacaaaatacaatagaaaattgtattccatacctaagacacacgcgctagacgcggcatgcgtaggtgatatttgtggtgttaagaattggactgttccacacttaggaataaaatgtaccggtagaggaagctacgcaagaacaatattagacaaatatggttttcctaaagcatactttccaaaagaaaaacgagtatttggttttcaaacaggagatgttgtaaaagctataatcaaaactaaaaatacgtttaaaatagtcattggaaaaattgttataagaacttctggttatttttccttagtaaaagaaaaagaaagttttaccgtaaaatggtctaaatgtaaacttgcccaaagagcagacgggtaccattactataataaacaatacggtttctatagtgttggtaataatattttaacaactggacaattatga

SEQ ID NO: 1300 - DNA, 243 bp, Unknown
  MLSBCLC_10010460 JGI
gtcaactacccctccctaaaggaaggagctttgctctaagttgaccagcctcagtctttaactagactacgttatctgagaatatataggtactccgggatgctcactcagtcccggactctacgcttgcatattaaacaatcctgagggtaagggatagtgtatgtgagatacaaaacctcagaataaccttggcgagggtgtttttacaagtcgcgtaagcgaaaggacaaaatcatggca

SEQ ID NO: 1301 - DNA, 1044 bp, Unknown
  Ga0335055_0000121 JGI
atggtagcagtattagatgaaaacaagaaacctttaatgccttgttcagaaaaaagagcaagaaaattattggaaaaaggagaagcaaaaccttattggtttaaaggagacttttgtattattttacagagaaaacctaaatcagattacaaacaagatatttgtataggtattgacccaggtagtaaaatgtcagccttaacgattaagtcagaagctcagacaattaaaaacgttcaatattctgccccaaatttcgtaaagaaaaaggtagaaataaggtcagcttcaagaggtggtagaagaaagagaaacacaccttatagaaaatgtagatttaacagaaagggtaataaaagaataccaccctcaacaaaatcaagatggttgcaacatttaaacttaattaagcatttttctaaaatttatcctatcaatcttgtagcttttgaagacgtaaaagctaaaaaaattaaaggagctaaaagatggaataaaaactttagtcctttagaagtaggtaaaaattggttttacgatgaagttgaaaaaagttatgcactttacttatatcgaggatttgaaacttacacttttagaaacagtttaggtttacacaaaggtaaagataaaatgaaagttgcttttgaaagtcattgtgtagacagttgggttttagctaatcaagtagttggaggacatatagaaccagataataaaaaattaacatttttaaaacctttaaacttttacagaagacagctacatgaacattgtcctgctaaaaaaggaattaggagaaattatggaggtactttatccttaggaataaaaagaggtactttagtaaagcacaataagtggggtttttgtttagttggaggaacaagtaaaggtagaattagtttacattgcttacaaactaataaaagattgacacaattagcaaaaaaagaagatttaaaaataataactaatttaaaatggaacagctcaattcccacttttatagaagaaaagagtaactttgagcagaaattatga

SEQ ID NO: 1302 - DNA, 241 bp, Unknown
  Ga0335055_0000121 JGI
gccaactacccacttctgaagagagtgggattgaaggaaaaccttaacgaggactaactttaagttaaacaggagaatagcttagacaagttcagaaatggacgtttgaagtcaactaaggagtgtagtgcatcgaaaggcacgagttatgttacaagatgcttcccaagtcagtaaccaataactatccgagtagcgaagggaaattaaaacaaggtgcctacgcacattaaacagttaa

SEQ ID NO: 1303 - DNA, 1404 bp, Unknown
  Ga0265338_10013913 JGI
atgtccaaggtgctggtggtggatacaaacaggcagccgcttgatcccgtgcatccagggcgggcgcgccagttgctcacccagggcaaagcggcggtgctgcgcgctgtgccctttacgttgatcttgaaaactgcctgcccggaggcgcaaccccaaccactgcgtctcaaactggacccagggagcaaaacgaccgggctggtgctgctgaatgacgcgaccggtgaggtggtcttcgccgcggaactccagcatcggagtcaggcaatcaaatcggcgctggttgagcggcgcgcgtctcgacggttccggcgtcagcgtcagacgcggtatcggcagccacgctggcgcaatcggcgccgggcagcgggctggttgtctccctctcgtgagagccggctggccaatatccagacctgggtccggcgtttgcggcaattcgccccggttgccgcgcttgcgttggaactgctgcaattcgatccctctcgcatagaacaggccgtgtgcagtggcgaggagtaccagccagggacgctggcaggttctgagatccgtgcgtatctgctggaaaagtggcagcatacctgtgcgttctgcggcgtgcggcatctcccgctccggatcacccctattcagctctccgccagtagtgggacaacccaggtagagaatctcaccctggtctgtggcgcgtgccagggagccagaggcacgcaggatctgcctgtttttctggcgaccaggccagatctgctcaagcgactccttgccgttgccagggttccgtgcaaagatattccagcagtcaatgtcatgcgcagggtgttgtatgagcgtctccaatcctctggtttgcctctcgaatgtggcagcggaggacgcaccgcgtggaatagcaccacgcgccagcttcccaaaacgccctggcttgacgcggccaatgttggcgcaagtaccccggctgtgttgctgttcaagcaggttcgggtgctccagatcaaagcgacggggcatgggagccgtcagatgtgcagtcagttagcgtatgggtttcccgtcgggcaccacctgccacgcgagcaagggaagccagtgcgagggcaccgccagcgccagaagcgctactttggatttcaaaccggggatatggtccgcatcgttattccagtcggtcggagtaaatacgcaggcacctatgtgacgcgcatcacggtccgggcgaatggcaactttaagtttcggctggcaggaggtcagtatgttgcgtgcaaatatgggtattgccagatgatccagcgcagcgatggctatcagtatacttccagaacagagagcctgtcgaattcagggatgccagtggtgctgatagagtcgctctgtcagcaccagagcagatag

SEQ ID NO: 1304 - DNA, 285 bp, Unknown
  Ga0265338_10013913 JGI
gttgtgcacctgccgacaggcggtgggaccaggcgtctcaccgtctgccaacaggtgaagttcatgaaaccagaccaggttctgcggaactccgttagaaacgaatagataggtacctacaggtgcgaggccagccggtagcactacggtggatgattaaacaggtgaaacggcacgacgaagccagtgtcatccacaacaaaccgtttctaaccttgtcgaggccaccattacccgcgcaagcggaggcttcttcggaagcagaaggtataatccatgtccaag

SEQ ID NO: 1305 - DNA, 1329 bp, Unknown
  Ga0063011_10003046 JGI
atgatcaggaaattgtttaaacgaaagcaggtaaggattacaggtggtggaccatcaggaaaacctgtagtggtaatttttctatacaaggagtttgaccctgacaggacagtcaatcgcaggtttatcactgttgttgaccctggctataacaggatagggtttgcagtatgtgagattaaggataacagactggtagttttctgtaaaggtgatatggagacatttatatctgacataaagaaaaggatgacagaaagaagggcctatcggagactaagaagatatatcagtcgctataaaaagagaaggctatcagtaagacagggcagaccacttacaaagttcaagaaaccaaggaacgtaaagtcaacacacaggatttcagctacactcagacatgcagtagatattcacctgaacatgtatgcactgcttcaaaagctatgtcctttgcctgtatatcagactgaaagggtcatagaagataatacatttgacataagggcaatgacatggggatctgcatatggtagagagtatcaaaaaatccccaggcagactaatacagaaaaaagatgccttatctgtggtgaaaccagcgatttacagaggcaccacttaatcccgaggaaacagaacggcacggatgtaagggaaaaccttatctatctatgtcgcaactgtcatgaagacattcatgctggcagggtatatctgcctgttaagggggtaaccatgtggagagcattaggaacaatgaatgcagtagcaggcatactgaatcaggttagcggactccgacatgttcctgcctctgacatggccttagcaagaaaaacactggggatagagaaattgcatggtaacgatgcagcagcagcaggcgtggcatacagtcactgccatgaggtagttgacactggcagttatctatccttgaagaagacccgcaggcataacagggcaagggtgcatgcagtcagggacagactttataagataggtggcagggtagtagctaaaaatagaagaaaaaggacagaccagaaggagaagtcatttgcagagctatcgctggatgaaagaaagagagtaacagtctatcctggggtaaagatactgaacccattaagggagaatatgcctgcaatagctggagacatctgggtacacaaacaaactggtaaaagatttgtagcaaacggcgttattgcaaggaactatatctactcgcctgacctgaaaggaataacagggaacccctacattagccctgatcagtgcaggagattgttgagaaacgaggggatagtaatatatgggtaa

SEQ ID NO: 1306 - DNA, 276 bp, Unknown
  Ga0063011_10003046 JGI
gtcaaccaccccgccctgacgggcaggggcttgcattagggggtgaacctggtgcaggtattccgggctaaccggatagtggttgaacgagggctgtgctgatgcagaaactggcgtttcagggttacactccaggctctgagagacagaggtgcactcctcttgcaggagtaacccctcaacctcacacagggtgcatcagcatcccccatggagacgaaccatcctcatggatgcccggatcacagggcaccgtaaggtggtagaaaggagcag

SEQ ID NO: 1307 - DNA, 1449 bp, Human gut metagenome
ttggcgatgtggaccacggggatgtcatccaaaataaaccgaaaaaccggtttttataggatttcagaaccgatttattcattcaatatgaattataacagaaagaagagaacacttatgacgatttttgtattaagtaaagacgggaagcgactaatgcctaccataagacccggtaaagtccgtcacctgttaaaagatggaaaagctaaaattataagtcaccagccattcacgatacagcttttatatgatacgaccggctatacacagccgattgaattctgtgaagatactggtgaccgctatattggaattagtatcaaaagtgagaagcaggaatatgtcagtcaggaagtgttgccacttgccgacgaaaaacagaaacatgacgcacagaggaaaaatcgccgcaaccggagaggacgcaggcgttaccgaaaaaacaggtttgataatcgccaaagagaagagggttggattgctccatccatagagcataaaaaggaagtcaacttagcatggtatcgaaaatatttaaacgtatgcccgatcactaatgcaacctttgaaactgggcagtttgacacccagaaacttcaggctatcgaaggtggcagtattcttccagaaggaaaagactaccagcaggggccacgttataatacggcaacgctccgcgaagtcgtgttcgtgcgtgatcactatacctgcgtattctgtggacgttccgtaaaagacaaagcagttcttcatgtacatcatgcattttactggaaaggcaggcatggcagtcaggtaaacgagctggcaacggcctgtgaaaggtgccatacaccggcaaaccatgcaaaagacggactattgtggggttataccccgggaacattcgttgcaatgggcggagctgctacaatgaatatcctccgccaccggatcgtgaaggaagcgaaagcgctggatgagcatgtacaggtatccgttacctacggagcagataccaaagcaatgagacagttcatgggtcttgaaaagagtcatgtgaatgatgcctatgttatgggaaatctacatccggaagaacgtgcagtttatatacgatacaagaaaaaacgacgtaacaaccgtatcctggaagatttctatgatgccagctatgtagattcgcgtgacggcagtatcaaaaacggcaaggaactttataatggccgtaccaaacgtaacaaaaacaggaacactgagaacctgcataaataccgtagacggaaggttacaaacggtcgtcgcgcaatgaagcgcaaaacagtttcattaagacctggagacatcgtatccctgaatggggaaactcttgttgttcacggcacacacaccagtaagaagggtgctgtaaatgtacagttcacaaagcctgccagaaacggacgaaaatctgccgatctgaagaag

SEQ ID NO: 1308 - DNA, 362 bp, Human gut metagenome
gtcaataaccccgtctgatttccttcgggaaatcagacgaggcttgtgaaaagaagagaatagtaacattcttcattgtttcataggcctgattgattagcctaagcagcaatgctacgttatccaggaatatactgtaggcaccgtcagatgctccacaagtgcgacgctctgcggcttatgattaaacatctctgagggtaggagaagtgttgtaagctttaaaccctggagtaacattggcgatgtggaccacggggatgtcatccaaaataaaccgaaaaaccggtttttataggatttcagaaccgatttattcattcaatatgaattataacagaaagaagagaacacttatgacg

SEQ ID NO: 1309 - DNA, 1125 bp, Unknown
  Ga0315284_10064466 JGI
atgatgccttgctctccggcaagagctaggaagttactgcatctgaaaaaggctaaagtagttaaaaaatgtccctttacgattcagttatcctatggatcttcaggctataagcaagaaatggtcggatctatcgtgcctagctcttccactataggaatagccgcaaagtcaaatgagaagtgcctatattcttcagaaatagtagtaaggcaagacatttctaaaaagatggatggaaggaaaacatatagaaacaggcgtagaaatagaaagaccagatatcgaaaagccagatttttaaatagaaaatcagaccgaaggcatactcctacggttaatagcaaaatagaatcccatattagggagattaatagagttcaaaaacttttgcctgtttctaaatggttggttgtaaaggcatccaaagtagaagggcattttaaaaatggttctctcgatgaacagtggttaaaccttcaaagacaaacttttgagagagatggtttcaaatgtagacattgtaaaaaaagaggaaaagagcttcatgcccaccacattatacaccgacaagacggtggtgaagattctatagacaacttagttactttagataaagattgtcatgtcaagtatcatcaaggtaaattggaattgaaaataggagaacataaattcagggggaaaatagatactgagttagctatactgagaaaaaatttagatttggcgaatagtgaaaatgtatatggatttcaagccaaagttaaaagaaaactattagggttggaatactctccgagtaatgatgcttgcgctattttggaagtcacgcctcaaaacacttttttagttaaaaatgtccctaaaggagattaccaaaggactagaggggtgagaagtcagcaaaaagtacctaagaataaaattgttggttttaatcgttatgataaaatagagtatgaaaataatatctattttatcaaaatgagaatgtctataggatattttaagttgacggatatttataaccgagaggttccgaaggtaatagcagggcgcaaactaaaattattaggcaggagaaaatcatgtctcatagtgaacaaaacatttcatccctaa

SEQ ID NO: 1310 - DNA, 265 bp, Unknown
  Ga0315284_10064466 JGI
gtggattacccgcccctttaggggcgggcttcgagggtaaccttggggagtaattatttcaccatgactcggttttaggaaactaaaactccgttatttagcatgtagaaaccctagaatgccgcctcagttctaggctctttcgtggctctgtaaacaaggacgacagtcctagtcaaccacgttgcgaaggctgaataacattgtcgagaggaagtggttcaatgaacccacaacttaggaataggagataaactacttgtta

SEQ ID NO: 1311 - DNA, 1677 bp, Unknown
  Ga0194138_10000001 JGI
ctgaccagccttagtcccgttagggactacgttatcttagttatcataccccggtgtggccggtccagcaccgggcgctatgcaggctctgtaaacatacctagaggtagggtaagtcaacctggagagccgattacggtaagctttgataacattgacgaggaccacgtaactgccctacgggcacgtaaagggaacgatattatgtctaattccgtattcgtcttaaatgacgataaaacgccattaatgccgtgtaaaccggcacgggcgagattattattaaaacaaggtagggcagcagttttcagaaagcagccctttactatcattatgaaagaacagatagaaaaccctgttcttgagaacattgaggtaaagatagaccccggtagtaaaaccaccgggatagcgctagtaatgaatactaaacgtggagctagatgtatctggggtgccaaccttaagcaccgaggtcagcagatacgtgatgccttattgtcccgcgctcaaacgcgacgggggcgacgcagtcgtaaactgcgctaccgtaagcctcgatttttaaaccgagttaaatctaaagggtggttggcgcccagtatttacactcgagtagataataccctcacttgggttaaccgtcttatgcgctattcgccagtgacgtcggcagtggttgaactcgttaagtttgatatgcaaaagatggaaaacccggagattgcaggtaaggcgtatcagcgaggaagtctctttaactatgaagttaaagagtatttactgtatcgatataaccacacctgtcagtattgttctggtgcatctaaagaccccattttggagattgaacatattgttcctagagcatcaggtggtagcaatcgactgagtaacctgacactctcctgtgcgacatgtaaccgagagaaagggaaactgtctttggctgactggaaggataaatgtacccaccgaaaaaaccctattgacatgaagcgattaaaaggtattgttcgagtgggacagaacattaagcccgcactgaaagatgcggctgccgtgaacgctactcgatatcgtctagtagctgagctggactatctgggactacatacggaaacctcaggaggacacattaccaaatataatcgtaagcaacagggttatccgaaggaccattggatagatgctgctttagtcggagaaaggggttctcacgttcatatccctccggagttacatcctttaatcattaaaaaggtaaaagttaataaccgccagatgacaaagcctgacaaatatggcttccctcgaacgaaagctaaaggtccttcccgagctttcggttttaagacaggagatatcgcggcttccccgtttggcgtggggagggtggtcatccggacctcgggtacttttaacgtattaggaagagatgttagctggaagcgtttagtccatctctcctttactgacggttacgaatatgtggaccaacgcatcgtcaagatgattgttgataagcatactgtaattaaagaggtgtttgagagagtcatatcaaaaacattaattgacgccgattcccttctcatagaaggtacattgaatcgtaaagtagttcatggtatccgtagggacagtaaaactagagaccatactaaactatattaa

SEQ ID NO: 1312 - DNA, 246 bp, Unknown
  Ga0194138_10000001 JGI
gtcaataacctccccctaaaggggtaggcttgtaaaagcctaattgaccagccttagttcttaacagaactacgttatcttagttatcataccctggggtggccggtccagccccaggctctatgcaggctctgtaaacagttctagaggtaagaaccgtcaacctggtgagccgattacggtaagctttgataacattggcgaggaccacttaactgcttaaatgcacgtaaacaggaacgatat

SEQ ID NO: 1313 - DNA, 855 bp, Unknown
  Ga0070706_100065069 JGI
atgaaggtgtttgtcctatcacacaccggaaagccgttgatgcccaccacgccgaggcgtgcgcggatctttctcaaaacgtggcgcgcacgcatggtgactcgtgagccattcaccattcagcttcgtttcgagacgactacctatacccagccggtcaccgtaggagtggataccggttcccaaacggtcggcatagctgcaatcacgaaccaggaggtggtcgttcaggcggagatgtgcctacgcacagacatcagcaagcacctcctccagcgcaggcagtatcgcagaaaccgccgctcccgcaaaacgcgctaccgtgcggcgcgtggggccaatcgtcgcagaccctttggctggctgcctccgtctctgcgctcgaaagctgaagcgaccgtcaaagcggtacgttttgtcgcgaggatcctgcccattagtcaaatcaacgtggaaattggcagctttgatacccagcaaatgcagaacccggaggtctccggtgtttcctaccagcagggccaccttcagggctatctgctgcgcgagtatctgcttcaaaaatggcagagacagtgtgcctattgtcaagcgagcggagttccattacagatagaacacctcattcccaaatcacgaggaggcagtgatcgcgccagcaatctcgtgatcgcgtgcgatgcctgtaacaagcggaaaggaacccggacggcagaagagtttggctatcccgaaatccaggcccaggctcgtgtgccactcaaagatgctgcccacgtctcgtccatcaagactgccgttgtagatgctcttgcccagcagttcggactagagcgggtagcggtgagatatggg

SEQ ID NO: 1314 - DNA, 298 bp, Unknown
  Ga0070706_100065069 JGI
gttaatgacctccccattcgatggggaggcttgtgagagctggtctcttgcaagccggattgaccagactcagtctcagagccagccaggccgaggaagcgagcgtcttgactggcagtgaagaggctacgatacaactgagtgttcacgttcggaccctggtgtgctgccccagcaccaggcactccaactcctggcctaaccagtggtgcggttagccgccgtggccaggggaaagtaccgcgttgtatctgtgtcgaggggatcgacttctactccgaaaggagccttacccgat

SEQ ID NO: 1315 - DNA, 705 bp, Metagenome
ttgagagtatttgtattaaaccaacgaggtgaacccctcatgccttgctccccggcaaaggcacgcaagcttctaaaagccggtcatgcgaaaatcaaaagggtcaatccctttcaaattcaattgacccgagccacaggagagagcgtgcaaccggtgacattgggtgtggatgccggcagtaaaacgatcggtttaagcgccagtagcgccaagaccgaactctatgtgagcgaagtggctcttcgcacggatgtgagcgatttactgtccacgcgacgtgaatttcgtcgcgcccgtcgaaatcgaaaaacacggtaccgtgccgctcgattcgataaccgggttcgctctaaaaataaaggctggttagcccctagcgtggaaaataagatccaagcgcacatctcgcgcgtgcaaaacgtgtgccgtcttatacccgtgaacaaaatccgagtggaaacggcggcttttgacatccaaaagattaaaaatcccgacattgcagggatagattatcaaaagggtgatcaattggggttttggaacgtgcgtgagtatgtgttaaaccgtgacggtcatgtctgccaacactgcaaaggtaaatcgaaagataggatacttaatgtccatcatctcgagagccgaaaaacagggggtgacagtcccggcaacttgatcacgctttgtgaaacgtgccacaag

SEQ ID NO: 1316 - DNA, 252 bp, Metagenome
gtcaataaacccccgcttaaaagcggaggcttgaaaagccttgattgactagccccagtctgaagcattgtttcagactccgttcattgggaatacataggcactccgtggtgtcaatcctagctgcggaccctgcgaccatcgattaaaagcactgagggtaaggtgcggtgttgatggtacttaaacccctttgaacatggtcgaaggatttttaccgaccggcaacggtcgtggaaacaaaacttgaga

SEQ ID NO: 1317 - DNA, 1356 bp, Firmicutes bacterium
atgtcagttgcggttatgagcaagacaggtatgcgattgatgccaacaagcgaatatcgggcacgtaagctgctcaagtcaaagaaggcaacggtatatagatacaatccatttacgattcagctgacagaaagagagacgggtgatgttcagacggtagaactttgcatggataccgggtatcttcatattggaacgtctgtaaaatcggagaagcacgaatatcttggcgtgcagattgatacgttaacagacgagaagcagaagcacgatgcgtgcaggatgtaccgcagacagagacgcagtaggaagagataccgccagtcacgattcaataacagaaaacgtagtgacggatggattgcaccgtctctggagcataagaaagatatccatatccagacgatttcacgcatctgcaatgcaatgccgattaccaacattacattggaaatgggaaattttgatacacaggtattgaaggcactggaagaaaatagaccactgccacagggaacggattatcagcatggagagagatacggtattgcaacgctccgtgaagcagtgtttgcacgtgacaagtatacgtgtcagtgctgtagaaaaacgatagcagacggtgcaattctgcacgtgcatcatataatataccgaagtcgaggtggcacaaatcgtatgtccaacctcgctacagtatgcgatagatgtcatactcctgcaaatcataagccaggtggtaggctgtacaactggaaaccaaagattgcgtcgttcaaaggtgcaacattcatgaccgccgtgcgatggaagatgtacaacgaggtaaaatctaagttttcagatatcaatatccatatcacgtatggagctgagacaaaggaacagcgcagggcttttgatatcaccaaatcgcacgtcaatgatgctcttgtaatgggacagtttcatccgaagcatcgttcaagaccagtatgctataagaagaaacgcaggaacaatcggtgtctggagaaattctacgatgcgaagtatatcgacagtcgtgacggtaagaagagaagcggtcaggaactgttcaatggcagaatcaaccgtaatcataagaaagattccgagaatctacatcaatacagacaacagaaagtatccgctggcagaagaacaataaggaaacaacattattcgatccagcctcacgatattattgtgtttaacaggcaacaattcgagacatccggatgtcactgtaatggggcaagagcaatcctgctgccacagaaaaaatctgttgctatcaaaaaacttagcatccacaaatatgctggtggatatttcaaatcagattttacgtaa

SEQ ID NO: 1318 - DNA, 457 bp, Firmicutes bacterium
gtcaataacccacgcccgagataaatctcggacggggcttgtgaaaacagatatgtttttataagtcacgtttttatttatcgaaggcgttgaccgtaaggtcagattgattagcctcagtgtgcagcggagccagtcgactgtttcatatagccaggaacacttccagcacactacgttaccggtaaaataggcactctgtggatgctcctcaagtcccagactctgcggcatgcgattaaacatctctgagggtaggagaagtgtggtatgcgttaaactaccggataacattggcgatgaggacaaccgactctgattcggtactggcttgccagtgccgaaaggatagagaatctgtgcgagttgctttgaggtttcaaagtggccggcacagaaggcgtaagccatccggttctgccggaaatatttcatgtaaggagggcagcttatgtca

SEQ ID NO: 1319 - DNA, 798 bp, Unknown
  Ga0370526_00122 JGI
atgtctaactttgtattcgtgcttgataccaacaaacaaccgttaagtccagtccatccagggcaagcaaggcgactattaaatttacaacaagctgcggtgtatcggcgctacccattcacaatcatattaaaatatgcagttcccgaccgcacaatacagccctgtaaactaaagattgatccaggctctaaaactactggcttggcgattgtgcaagatgataaagttatctggggtgctgagttgacgcaccgaggacagcaaatcaaggatgacttagaatcgcgtcgcgctattcgtcgcaaccgtcgcaatcgcaaaactcgttaccgcaaaccgcgttttttgaaccgtactcgaagagaaggatggttgccaccaagcctagaatctaggattgaaaatatccttacttgggttaggcgaataactcgatatgtcccgattacagggatatctcaagaactggtcaaattcgatcttcaagcaatgcaaaatccacaagtttcggggaaagagtaccagcaaggcgaacttgcagggtatgaagtcagagagtacttactagagaagtggggtaggaagtgcgcttactgtggtgctgaaaacgtgccttttgaaatagaacacattcacccgaaatcaaagggaggtagcgatcgcgtttctaacctcactcttgcttgccatttatgcaaccaagccaagggtaatagagatattaaagattttctagccaaaaagcctgacgtgctatcccatgttttaagacaattgacatcctccccggtctga

SEQ ID NO: 1320 - DNA, 273 bp, Unknown
  Ga0370526_00122 JGI
gctatccgctaaacggtgaacagggctggacaaccagcccttttgctggacagatagccagttcctaagccttaaatggctacgttaagaaggtcaagacacctaaaagtgctttccagcttttagctctgtcgattaactttaaacatccgtatttagctaaggaagtgagttaatcccaacaagcctttttaacattggcgttcgcgaagcgtctccctttgggagaggaaaacataacctgagaaatcagaggacaaaatgtctaacttt

SEQ ID NO: 1321 - DNA, 1284 bp, Nostoc commune HK-02
atgtccaaagtatttgtaattgatactgaaaaaagaccattagacccaatccattcagcccaagctagacaactattaagaaacggtaaagcagcagtttaccgccgttttccgttcaccattattctcaaaaaatcacattcagatttatcagtaacaccactgcgattaaagcttgatcctggagctaaaacaacagggattatattggtcaacgatactactggggaagttatatttgcagccgaactaaaacatagaggctttgcaattagagatgctttaacttataggagacagttgagaagtagcagaagaagccgtaaaactagataccgtaaaccaagattcttaaacagaatacgtccaaaagggtggttagcaccgagcttacaaagtcgtgttgaaaatatcaaaacatgggttaataagctacgtaaaattgcacaaattgaagcaattagccaggaattagtacgctttgatatgcaattaatgcgtaatccagatatccaaggaaaggagtatcaacaaggtactttgactggttacgaaatcagagaatatttacttgaaaaatggagtagacaatgcgcttactgtgatgctaaagacgttccactacagatagaacatattcacccaagagccaaaggaggcagtaattcgattactaacctgactctaagttgtgaaaaatgcaacacaaagaaagaaattaaggatatcaaagagttcctaaaaaaagacaaaacaaggctagcaaaaatattggctcaaacaaaaaaaacattaactgatgcagcagcagtaaacacaactcgttttgcattgctagaggctctaaaagcaactggattaacaatagaaacaggttctggtggattaacaaagtttaatcgtagccaacagaatctagaaaaaactcattggttagatgctgcttgtgttggtaaatcaacgcccaaattgattattaaaggtgttaaaccattgttgattatagctaacggtcatggtactaggcaattatgtcgcacagataaatacggttttccaaatcgtcattgttcaagagctaaatttcactttggttttcagactggagacattgttaaagctgttgttaaaactggtaagaaagttggtgaatatattgggagaattgcaactcgtgcaacagggagtttcaacatctctactaaaaacggattagttcaaggaattagtcacaaatattgttcagtaattcacaaaaaagatggctactcatatacacaataa

SEQ ID NO: 1322 - DNA, 252 bp, Nostoc commune HK-02
gtcaaccacccaccactaatcggagtaccgatatagtgggagcttgaaagagcctagttgtccagtctaagtgttaaatcactacgtttaaggtaagtgttcaagacctaccagagaatgcgtagctagttctttgctctagaacttaagagttaaacaggtttaagggttaagccagtacttttgagatagttaccgacctgaaacattgacgaagctaacattacccgaaaggagggacttatgtccaaa

SEQ ID NO: 1323 - DNA, 1374 bp, Streptomyces lincolnensis
gtgggagcagacacccccgggagcagggacgaaacggctcacggacatcccgccaccgcgcgggacaccggccgggaacatgggcgaggggagaccgacgggcgcggtgacgctcccccgcacaacccgccgtacaccggcggcatcggcgcgagcagagtcttcgtcctgtccaaggacggacacccgctcatgccctgccaccccgcccgcgcccgggaactcctcggcaagggacgggccgtggtcgcccgacaagtacccttcgccattcggctgcgtcgaccccggctccaagggcacgggtctcgccctcaccgacgagaagaaggaagtcgacgcgcacggcgccgtcgtcaccgtcagacgcgggctcacagcactggaactccagcaccgcggcgaccagaaccaccgatccatgcagcagcgtgccggttaccgacaccggcggcgctccgccaactgccgctaccgagcccctcgcccagacaaccgaccgcgccccgcaggatggctcccaccctccctgcgccaccgcgtcgacaccacctattcccaggcagcacgcctctgccgctacgcccccgccaccgagatccacatcgaacgcgtcgccttcgacacccacgccatgagcgcgggcagacccctcacccaagccgagtaccagcaaggcacactcgccggaaccgaagcccgcgcctacctccacgccaagtggaaccactcctgcgcctactgcgacgccaccggcgtacccctgaacatcgaccacctcaggccccgcagccaaggagggtcgaaccgcatctccagcaggtgagaacgcccctccatgacgccgccgccatgaacgcgacccgttggcagctcacggaaaccctcagcgacctcggcaagccggtacacgcctggtcaggcggccgtacgaagtggaaccgcagcgccatgggactggagaagacccacaccctggacgcgctgtcggtcgggcgcctgaatcatcagagcggcgacgccatcgtgcggttcccggggcaggtgctcaacgtcaaagccaccggtcgcggatcgtacgcccgcaccactccggaccgcttcgggttcccacggctccgccgggcccgcaccaagcagcacttcgggtacgtcaccggggatcttgtccgggcccatgtaccgaccggcaagtgggcaggcacatggaccgggcgcatctccgtccgcgccagggggcaacacagcctcaccacaccgaggggtcgtatcaacgtctcccaccggaatctgagactgctgcaacggggcgacggatacggctacagcacccggcaggaactctcagagtcaacttctcaaaaaaccggttga

SEQ ID NO: 1324 - DNA, 330 bp, Streptomyces lincolnensis
gttgcttgcacccttcggaaaggaggtcactcgctccccaacgcaggttgccgagtgaccagccccagtcatcacgatccccaagatcagggaggtgccccgatgactacgttccccgcaggtgagtagacccaccaggctgtgcttcctcagcagcctgctctggaatccgtgggagcagacacccccgggagcagggacgaaacggctcacggacatcccgccaccgcgcgggacaccggccgggaacatgggcgaggggagaccgacgggcgcggtgacgctcccccgcacaacccgccgtacaccggcggcatcggcgcgagcaga

SEQ ID NO: 1325 - DNA, 861 bp, Thermoplasmatales archaeon Gpl
atgtaccgtaggaacaggagagacaaactctggtacaggaaaccaagatttatgaaccgtggaaacaaaaagaaaggatggcttgcacccagcatagatcacaaactacagactcacataagactgattgagaaactgaaaaaaatacttacaatatccgatattattattgaggttgcttcattcgatcagcagaagatgaagaaccctgagataagtggaatagagtaccagcagggagaacttcagggatatgagatcagagaatatctccttgagaagttccatcatatctgtgtgtattgcagcaagaccggtgtgcctcttgaaatagagcatctcacacccagatcaaggggcggctctaatacagtagacaaccttgccatctcatgccatgaatgcaaccagaagaagaacaaccttaccgcagaagagttcggatatcccgatctgagaaagagtgcattgatgccgttaagagatgcggctttcatgaacactgtaaggtggaaactcactcagctaactggagcagatcatacattcggttacatcacaaagaggaatcgtatttctttggggttggataagagccatgccaacgatgcatttgtgattgctggaggaaccaaccaggccagggtattgccatttacaatcacacagagaaggagggacaaccgttctatccagacaaacaggaagggattcaggccatcaataagaaggaaaagataccccttacaacccggtgatgtagtggaattcggggagagcagatacgacgttgttggggttcatagttatggaaattatgtaataataaggaatggtgaaaagaagatgaatataagcacg

SEQ ID NO: 1326 - DNA, 520 bp, Thermoplasmatales archaeon Gpl
gtcaactacccctccctgacggaaggggcttgttccgtgaggaacagcgcaagagttgattagggggctttgaaagacatggtgaaaaacatgaaagagaagcagaagttagattggagaaatacatacacacctacggatgctccacaagtccgtggcaactgtgatcatgcattaaacagagaggaaactctcagtgtgcatggtttaaaaaccccttctaacaaccccaatgtggacctacagtcaggcatggctggacaggacctgagggttcccgttataaacatgcgcaacgaaccattaatgccgacaacaccaggaaaggcacgaacactattgaaatctggaaaagcaagggtgatcagttcaaatccattcactattcagctcctctatgcaaccggagagacaaagcagccagtaatattgggtatagatgccggatacaagcacattggattctctgcagtaacagaaaagaaggaactgatatacccaaactcaataaagagaaatc

SEQ ID NO: 1327 - DNA, 942 bp, Microcoleus chthonoplastes PCC 7420
ttgagcaaagttttcgttttagataccaacaagcaaaccctcaatccaattcatccgggtagagccaggttactgttgtctcaagggaaagccgccgtattccggcagtatccctttaccataatcttaaaaaaggaggtaagtaatccagttgttcaaccattgcgagtaaagattgacccaggggcgaaaaccactggactagcaatagtcaacgacaacactggcgaggtagtttgggtagccgagttacagcaccgagggtttcaacttcgggatgctttgacttcacgtcgtcaactacgacggtcgcgacgcaaccggaaaacccgttaccgtaaacctcattttttaaaccgcacccgtccgccatcatggttgccgccatctctaaatagtcgagtggctaatatactgacctgggttaagcgtttgtcggcactgtgtcaaatcactgccatttctcaagaattggtcaggtttgacacgcaaaagatgcaacaagcagatattagcggagttggctaccagcaaggcaccctagcaggctacgagatacgagagtttctactcgaaaaatggcataggacttgtgcttactgtagcgctcgcggaaccaagcttgagattgagcatatcaagcttaaacccctactgattgctgccaagggacatgggactcgccaagcgtgccgtaccgataagtggggttttccacagcgttattgctcccgaaataaagtccacaaaggctttcaaactggagatattgtgaaagcgatagttaccaagggcaaaaaagtcgggacttatgtggggcgtgtagctactcgtgcctctggcagcttcaatatttcagcgaggaacggattagttcagggcattaatcacaagtattgtaaatttatgcacaaaaaggatgggtattcatacgcaaattaa

SEQ ID NO: 1328 - DNA, 241 bp, Microcoleus chthonoplastes PCC 7420
gtcaacaacccaccactgaccctaggggtacagtgggggcttgaaagaaagccctagttgaccagtctaagtacttttgtactccgttttttgagtcaagacacctacaaatacgacgccagtttgttgctctgtcatctaacgttaaacaaccatttgggaggtagtgcgttaggtctaacaagctcaaaaaacattgactaggcgaacattacccgcaaggaggctcactttgagcaaa

SEQ ID NO: 1329 - DNA, 1077 bp, Moorea bouillonii
atgttacgagttccagttatttcgcctgatggcaaaccattgatgcctacaaaagcttctcgcgctcgtcgttggcttaatcaaggtcttgctatcgtttacccaaatgatctaaatgtttttgctgttcagttagttaatcaaccatctagttatcagactcaggatatcgctattggtattgaccccggaaaatctttttctggtatcgctgttcagtcaaataaagccactctttggacagggcatttagtgttgccgtacaaaaaagtccgcgtaggcatggatactaggcgaatgatgcgaagaactcgcagaagtcgtcgaataaatcgcaagattccttattctcaaaggtctcatagacaaaagcgattctcgaacaggaggaacaaaaaggttcccccttcgattcgggcaaaccgtcaactagaaaatcgggtagtaagagaacttagtcttttgtacccagtaagtgccattgtttgcgaaatagtcaaggctaatggcaacaaaggtttttctcctgtgatggtaggacaatactgggcaatatctcagttagaaaaaatagccccagtgactcagaaacaaggctgggagacagccttgaagagagaagcgctagggctgatcaaagacaaaatagacaaaagtcggcaaacagttaatactcatgcagtagatgggattgcgttagctgctactcatttttaccgacgcaaaaattattatcaccgcaatggaaaattgagtgtccccaaaaactgtgaagtaactaacgctgtgttttccgtaattagacgtgcccccataagtcgccgtcagttacacctattgcagttttctaaaggtgcaaaacgtcgcaaatacggaggaacaaccactagtcatggttttcgcaaaggagactacgttgaagcggtcaaagccgggaaagcctaccgaggttgggtaagcggtgagacagcaagacaagtttccgtcagcgatatcaattggaaaagaatcggacaatttaccgcccgaaaagtccgacttttaaaacgttcgaccggcttaattgtaaaccactaa

SEQ ID NO: 1330 - DNA, 217 bp, Moorea bouillonii
gtcaataaccccaacctcaacgcagtaggttggggcttggtagacaaccaactaccatgattgactagaccatttgagccgaattttgggacgaacgcttggatacttccccagtccaagcctcttcaaaactgtgttgtcagttgctgttagacaggaaatcttcaattcggtggtcgaggggacgagttattaactcaaatacttttctcgtgag

SEQ ID NO: 1331 - DNA, 1473 bp, Human gut metagenome
atgaactacgtttatgtattagataagaaagggaagccattaatgccgactacccgttacgggaaagtccgccggatgctaaagtctggacaggcaaaaccggttcagaaccttccatttacaatccaattaacttatataccaaaaacaacggtctgtcagccagtgattgtcggatttgatccagggcggactaatatcggcatttctgctgtccgagaagatggaacctgtctcaatcttacacattgtgagacacggaacagagaaattccaaagctgatgcagaagcggaaagaacaccggcagacatccagaagaggagaacgtcttgtccggaagagactggcaaaacgtcatgggacagtaagttcaaaaccactggaacggatactcccaggttgtgaaaagccgcttaaagtcaaagacatcattaacacagagagtcgttttaacaaccgtctgcgttcggaaggatggctgacaccaacggcgacacaactgttacgaacccatgtgaacttattaaaacgcatgtgtcagatacttcctgccacggatgttgttatggaagttaaccggtttgcttttatgcagctggatcaaccaaatgtaaaaaagtgtgggattgattttcagcatggtccgctgttcgggacagacgggataaaagaggctgtctctatccagcaggatggacgctgcctcctttgtgaaaaacggactattgaacattaccatcacatcgtaccaagagcataccgtggaagtgatactgccgaaaacatcgcaggactttgtgccggctgccacaaattagtacatacttcacgggaagcctcgaataaactaaagcacaagaaggatgggatcaacaagaaatacggcggaatttctgtcttaaatcaggtaattccatttctgtttatggagtttgagcagatgttcccaggacatacttatgcaacaaatggatggaatacaaaacagttccgtgaaaaatacaggcttgcaaaagatcatagtgtagatgcttattgtatcgctgcaagtattctgccagaacccaaagtggagcttccagaagatacgcatgagattgtccagtaccgcaggcatgaccgtgctcgtatcaaacggcagacggaacggacatattgccttggaaagaagggggtctgtaagaatcgacataagcgtttcgaacagaaaacggattctctggaagagtatgtagagaaatacccgaattttttatccaatctaactgtaaagaaatcgcagcgttcttataacgacttaaagagagttcttccaggggcagtgatactttatcagggaaaacgatatatactaagtgggcgatcttctggtgggaaacagtaccgtatgctcggatatggaaatcaaaattttactgcatcgaagtgtacgattgtacaacagaacactggacttgtgtatgtaagttag

SEQ ID NO: 1332 - DNA, 235 bp, Human gut metagenome
gtcatgaacaccgagcgacttcgtcggtctggggcttggatgggcttacgccctgaaaagctttaagacggaagctgcaaagagtttatgagcagagcagtgacataccgatcgccttcaggtgattccaagcctgaagctccggctataggtgtgcctatgctatggaaacacaacaggatggaggaaagatccaaagtcctgacttaccgtaaaggagtaacttatgaactac

SEQ ID NO: 1333 - DNA, 1419 bp, Unknown
  Ga0119967_10003500 JGI
ttgccgacatccccgaggggagcgaagccggaaggcttccgttacaaggcccctaagggcagaagttgggagaaaacaatggctgtttttgtattggacagaaggaaaagaccgttgatgccgtgctctgagaagcgggcaagattgctgcttgcacggggacgggcaaggatccatcggttgacgccgttcaccattcgattggtcaaccgcacggttgagcaatccgtgttgcagcctgtacgcatcaagttggaccctggaagcaggacaaccggaattgcgctggtaagagacggtgaaacgggtaggacagcgcatgtgctgtttctcgccgaactgcaccatcgtgggcaggtgatcagggatgcgctcacacagcgcagggctttcagacgcaggcgacgcacggcaaacctgcggtatcgagcaaagcgattttataaccgcacgagacctgaaggctggattgcgccatctttgcggcatcgtatcgagacgactgtttcttgggtgaaccggctgcggcgctggacaccggttgcagcgatcagccaggagctggttcgcttcgatacccaaaagcttcagaacccggaaatctccggagttgaataccagaaggggacgcttttcggcctcgaggtgcgcgaatacctgttggagaagtggaaccgagcctgcgcgtattgtggtgctcggaatgttcctctggaaatagagcatatccagcccaggagccgaggcgggtcggatcgggtatcgaacctaacgcttgcctgtgacaggtgcaacaagcggaaagggaataaatccatcgaggagttcctggcccacgatccgaagcgcctggctcaggtcaaggcgcaggccaaatcaccactcaaggacgcagcggcggtcaacagcacacggtggaccttgtggcgacagcttcgggatatggacctggaaatagaggtcggcacaggcggtcggacgaagtggaaccggacccgtttggggctacctaaaacccatgcccttgatgcggtttgtgtgggggatgtgaaagcggtgcaaggatgggccgtgccggtgttacaagttaaagctgctggccatgggagctatcagcgcacacgtcttgaccgttttggttttccaagaggctgcctgatacgtcaaaaacgtgttcaggggtttcagatcggagacctggtcaaggctgcgatatcaaagggtataaaggcaggaatttatgttggccgtgttgctgtgcgggcttcgggaagtttcaacgtgcaaacggcacacggcgttgttgaggggatttcataccgctattgccgattgctccaacgcgcagacggctatggctactttgtgcaactttgtggaatagcccttggaaaggaagaattgcgagaggccgcctga

SEQ ID NO: 1334 - DNA, 287 bp, Unknown
  Ga0119967_10003500 JGI
gtcaactaccccgtcctgaagggcggagcttggggaaacctgagccaggttgaccagggggagcggggaatccgctacgttggcaacaggtcgttaagacccactccgggatgcttcctcagtcccggacactggaaggctcggatcatgctggcgaaaggtaaagcgccgaaggttcaagtcgccgcgaaagcgggagccggttgccgacatccccgaggggagcgaagccggaaggcttccgttacaaggcccctaagggcagaagttgggagaaaacaatggct

SEQ ID NO: 1335 - DNA, 900 bp, Polaromonas sp. JS666
atgccgtgcaccgagaagcgggccaggctgctgctggcacgcggccgggcgcgcgtgcatcggctggtgccactggtgatccggcttgttgaccgtcaggccgccgcctgcgactttcagccgctacggatcaagctcgatccgggcagcaagaccaccggcgtcgcgctggtgagggatgtggaatcggttgacgcgtccacgggtgaaattcatagtggggtagccgtcatcaacctgctggatctggtccaccggggccggcagatatccgaagccttgacggctcgtcgtcagatgcgccggcgccgcaggagcaatttgcgctgtcgcgcacccaggttcctgaaccgcggcaacaagaagtccggctggatcgcgccctccctgcagcaccgggtggacacggccatggcctgggtcaggcgcattcaacgttgggcgccggtgagggccatcagctccgagctggtgcgctttgacatgcaggcactgcaaaacccagaaatttccggcgtggagtaccagcaaggcaccttgttcggctatgagctgcgcgagtacctgatgcgcggcaagcgtgtgcagggctttggcaccggcgatatggtgcgcgccgaagtgcccaagggcgtcaaggccggggttcacgttggccgagtggcggtacgcgccagcggcagtttcaacatccagacccatcagggcggaatctccggcgtggttcagggcatcagccataagcattgccgggtgacgcagcgcaacgacgggtatgggtatttcttcaaccgggccgatcacacagggcgtgagcaggtatggcccaaggcatcggatgctgcgcatccggcgctctacctccccgccatgaatggcagggtttcacgcgcaatctga

SEQ ID NO: 1336 - DNA, 361 bp, Polaromonas sp. JS666
gtcaatcaccccaccctaaaggatggggcttggaactgaaaggagccaagccaggttgaccagggaaagcggtaatcaacccgctacgttagcaacaggtcgttcagacacaccagcgaatgcttcctcagttcgctgctctgtaaggtcttgatcatgctggacaaaggtaaaggtccgaaggtcttgatcgcagctcgcaagggctggagccggttgctgacattcccgaggggagcgttctggagcgtcgtgaggcgcaccagagccgtcaccaggcccgtaagggctgaccgctggaaagacggcctggctgcacagtttgcagtgtgaattattgatgtcaggagttggtgtggca

SEQ ID NO: 1337 - DNA, 930 bp, Fervidicola ferrireducens
gtgcccggatcacagggctcctgcaagaggaggaaaaagatggtattgttcactgccgacaaatacggtaggcccggccacccgacgaaaaggttcgacatgataaggaaactgaggaagaagggtaaagtaagaatcgttggtggagggacctccggcaagccaccggtagcagtgttcctggacagggaatttgattgctccaaaacagtaccaaggaaactcatcatagcgctcgacccgggatataactacatagggtttgttgtgtgcgaaacaaaaaatgggaaactgatcgcatactgccagggtgttttacaaaccagaattcccgagattaaggagttgatgacagaaagaagaagacaccgaaggaacagaagatactattcgcggtgcaaaaagagacatttatccgccagacatggtagggttttaacaaaatttaaggcgccaagaatagtaagggctagagacaagtcgaacgccaccctcaaacatggtgtggaaacgcacttcaatctttacaaaaagcttttaaggctcttcccctttccagcagagcaggttgtatttgtcatggaggataacgtcttcgatgtcagggcaatgacatggggcaaaacatacggcacgggttaccagagatcacccagaacgccagcagagaggaaatgcatcctttgcgggacaaaagagaatttgcaaaaacaccacctgatacagcggaagagcggtggtacggacgttcaggagaacctggtatacctatgcaaagactgccatgaagatgtacatgccgggagggtatatatccccataaaaggcatcaagcagtggcgtgcattggggacgatgaacgcaataatggggaaactgcggaaaatgccgcggctggagtttgtacctgcatcggacgtggcacaggcg

SEQ ID NO: 1338 - DNA, 251 bp, Fervidicola ferrireducens
gtcaactacccccgcttgtagaagtgggggcttgtcggtaggggtgaactgctgacaggtctgctgacaggcaggtagttgaacgcgggtgtgcggcagcagaacctgacgttctgggacgacactcccagtcccgggagacagcggtgaaatcccgcggccttacacggggtgctgccgcacacctcagggagacccaccacctttcaaaaaggtgcccggatcacagggctcctgcaagaggaggaaaa

SEQ ID NO: 1339 - DNA, 852 bp, Uncultured Lachnospiraceae bacterium
atgatgcagagtgttgctgttttatcacgcaccggcagaaaactgatgccgacaaatgcgtacagggcgcggaagcttttaaaaagcggacgcgccggaattgagtgttataaaccgatgttcacgatccggcttgcagaccgggaggaaggagatgtgcagcctgtcgaatatgcctgcgatacaggctatcagcatgtcggtgtatctgtcaaatcagaaaagcatgagtacgtgcacaatcagtacgacatgctcaaagatgagacagaacgccacaatgactgctgtaaataccgcagggcaagaagaaaccgcaagcggtaccgcaaaccaaggtttgacagccgctctaagaaaaacaaggaaatggcaccttccctgcgtcaccgcataatgtatcagcgactggtcaaagcacacccggaaatcgacatacatatccagtacggtacaaagacctgtcttacccgacgtcttacccgacaggaacgtcatatcgcaaagacacacgcaaatgatgcttattgtatcgggcagtttcatccgaaacaccgtaccagaggacagatattccagaaacagcgccgcaataatcgtgtcttagcgaaattctacgatgcgaagtacattgacatgcgtgacggctccaagaaatcaggttcgcagctttcatgcggcagaacaaaacgacgtgaaagcagacgtactgacaaaaatgagcgtatttatcgtggcatcaaatgtcaggcaggcagtctgcatacaagaaaacagcgttatgacattcaggcaggcgatgtggtcatatttcacgacaggatacgtgttgtaaaaggcacacaatgttga

SEQ ID NO: 1340 - DNA, 320 bp, Uncultured Lachnospiraceae bacterium
gtcaactacccgcgactaaagtcgtaggcttgtagagctacaagtctggttgattagcctgagtgcctcgtgcactacgttaccgtgagctgcgtccggatgctccacaagtccggaccaactgggaactgtcgttaaaaattgctgagggcaggcaacgtgcggcagctgtttttaacccacggataacattggcgatgtggaccaccgtggctacggattttatccgcaagtacgagcatccgctggtctctacgactgcggaaaacgtaagttattgacttaagcaggaaggaggcatcagcgatgatgcagagtgt

SEQ ID NO: 1341 - DNA, 1203 bp, Thermotogaceae bacterium sp.
atgggtgttcctaaatatcatatggtgcttgtggtagatgcaaaaggcaggtcgttattgccaacacatccagcaagggcaagaaaactattgaaacaaggtaaagcaaaggtatacaagatggtacctttcactattcagttgaggtacgaagtcaaagaaccaaaaggagaatttactattggaatagacgatggagcagagttcgtaggtattgctgttaaaggtaaagataaaattatatttgcaactgatgtgagattgagacaggatgtcaaacgcaagattgacgaacgtaggatgtatagaagaaacagacgaaacagaaaactacgttacaggcctgcgaggtttttgaacagacgtcgtcctaaaggatggatgccaccaagtgtcaaatatagaaaagatgtaattttaagagcggtagatgatttacgaaaatacatgaatatgaccagagtcgtagtcgaattaggttggtttgatacgtcaagcatggcatgtggaagaaaacttaaaagcatagagtatcagcaaccagactttgaaggcagaaacagacgtgaacaggtgttgtggagagatggttataaatgtcaacattgtggtacaactatcaaattgcagatacaccacattattccaagaaacaaaggtggtacggacacattaaacaatctgataacgttgtgcgctaagtgtcacaaggaactacacgaaggcaaatgggtattaaaaaagaaacctaaacaatacaagtatcctgctatattgcaacaagggaaatggtatttgtacgagcaattagtggatagattcggcaaagaaaatgttaaagtaacatttggatggataacatcaaagaaacgaaaagaattaggattggagaaagatcattggttggatgcatgttctatattgaatacaaacaaaatagagacaagaccttttttgattatccctaaacgtcgtagaaaagaaataaacaatccaacgaagaaacacgaaactttcaaagggttcaaacattgggatcttgttaaagctgttcgtagtggtaagaaaatggtaggtgtaattaggagtttaaagaaacgaactttaaccttacgtacatcttttgatgataattttgaggttagttattcgaagacaaaattgttgtggagaccacaaggtttggtttacatattgatgtaa

SEQ ID NO: 1342 - DNA, 311 bp, Thermotogaceae bacterium sp.
tataacaattagtgtttttaggggtctgagcccgaggtggtccttggaagtgggataagctcccctgaggaaatgaactcagggtgtgaaagaggtggaaatctcaccacctacgttccgtggttgtccgtgaggacaggtaccttaaggtgttgctccagctctaagctctaccggccatcgggaacgaaacgtagactgagatgtcggtatacatttcgatggctatcagagaccatgggacatgggcgaggggcaccataaccccacaagggaggtacccttaaatgggtgttcctaaatatcatatg

SEQ ID NO: 1343 - DNA, 969 bp, Unknown
  Ga0307376_10002476 JGI
ttggcggcaacccggcgttccggtagagtgcggcaccttctcaaagaaggaaaagcccgcattttctgctacgaaccgtttactatccaattaacttacgagaacacggaatttgtgccggtagaaatgacgttggggattgatcctggttccagcgatactccagtagcagtcgaggtgcatgagcctgacgcggaaatgtgcagtatcgtttatgcgaaagagattctgcttcgcacagacatctctgcacagttgaagcgcagatccgatgcccggggtaatcgcagaaaccggactacccgttatcgtaagtgtcgttttcagaaccgcgttaaatctgtatgttcggtgtgcggcaaaaatcacacgccgaagtcttggaagaaagagaaacgcaaaaacagtaagggccacaaaaacgtttctaatggtcgtgcagcggtttgcaggaaatgtcagcatgaacgtccgagcgaaaagggtaatcatgataccgacaagatccttaaccccacgctgcagaacaaagttgataccatcgtagctgaggtcaagaaattggtcgagataatgcctgtgacgaagatccgagtggagttgaccgcctttgacactcagaaaatggccaaacccgagattcagggtatggagtatcaacaggggaccctgttcggttatgaagtaaaagaatatttgcttcataaatatggtcataattgtgtgtactgcaaagggaaaagcaaggaccttgttttggagatcgagcatgttataccgaagtcccggggtggcactgataagatatcaaacttggtgatctcctgcgagacgtgcaaccgggagaagggatcccggactgccgaggaatacgggttccccaatattcagaaagaggcggcgaagttcagggcttttcgctacagcgctcttactcaagctataaatgggcgttatggcaggagttaa

SEQ ID NO: 1344 - DNA, 368 bp, Unknown
  Ga0307376_10002476 JGI
gtcaattaccccaggctaaagccgggggcttgagggagaaatcctgacagtcttccgctttagtcaggaacgaaagttccataagcgacagcctaagtcctaatcgactacgttctttcgaatatcagacagccggatgaaacgcggcccttctccgggtcagctagtccggcacaactttctggaggctctgtaaagtccttttggggatggggcggtcaacctcgggacgacctgtcgttacaggcaactcggaagaacattggctgggaaatgaacgggcgaaagcctgtattattccccgcgaggggaaccatggagatgtatttgcagtgacacaggccgaaagaaggcccgaacaagaaccg

SEQ ID NO: 1345 - DNA, 750 bp, Human gut metagenome
ctgggcgtggatgccggcagcaagcatgtcggcctgtcagccacgactgaaaaggaggagctttatgccgcagaggtcgaattaaggaccgatatcgtggacctgctgtccacccgcaggcagaacaggcggacccgcaggaacaggctgcgttaccgtctcgcaaggttcgacaaccgtgtccactccaagaacaagggatggctggcaccatcgattgaacagaagattcagagccatctgaaagcggtaaaggatgtacataaactgctccctatatcaaagatcattgtcgaaactgccagctttgacatccaaaagatcaagaacccggatattgccgggaaagactaccaggaaggcgaacagctaggcttttggaatgtccgagaatacgtcttatggcgggacggacatgtatgccagaactgcaaaggcagatccggggacaagatcctcaatgtccaccacatagaaagccgaaaaacgggaggagacgccccgaataacctgatcaccctatgcgacacttgtcacgataaataccataagggagagatagagcttcacattaaacgggggcagtccttcagggatgccgcgtttatgggagtcatgcgatgggcgttctatgccaggcttcaggaacaatatagtaatgtccatatgacctacgggtatatcacaaagcacgtccggatcagcaaccatctggaaaaggatcactgcgtagacgccaggtgcataagt

SEQ ID NO: 1346 - DNA, 245 bp, Human gut metagenome
tggatgtcaataactcgccacttgtagaagtgggggcttcaagcctttattgatcagactaagcgcttcgagcgctacgttaccctctaatatatagttaccggtggatgttcagcctagtctgccgctctaaggacagtgattaaacagttctgacgggtaggaacagtgttgctgttaaaaaccgagggataacattgtcgaaggctgcctaactctagcatacaggaggttttaaaaacatg

SEQ ID NO: 1347 - DNA, 1527 bp, Erysipelotrichaceae bacterium sp.
atgcatcaagcgctgcagacattggcgatgggtgctacgtgcggtggacacggacagaacagtgttgtatctgtcgcaaatcaccaacttatagaaaaggaggcgtcagtcatgaaggtttttgtcatagggcggaatggtctcgggctgatgcccaccaaaccacgccttgcccgtatccttctttccaaaggaaaggcaatcgttgttaagaagagaccattcacaatcaaactgttatataagaccggcagtgccacacagcactgtgaggtcgggatcgacaccggttctcaacacatcggtgtagccattgttgcggacgatgttgtacttacaaaagaagagtgggaacttcgctcctcaatggagaaacgctctcttatggaaacgcgcaaggagtatcgaagtggaagacgttatcgtaaaaccagataccgtcaccctaagttcatgcctcacacaaaacgagtctattatgaaaaagctgtaactcggcacggccataagacacactggatcaaagtgaagaatgaattcacttcctacagagaagacggatggttagcacccagccttcaatcaaaggtggatcatcatcaccggattatagactcatatctttccgcattgccaaaagatacacatctgaatatcgagctcgcacggtttgatacacacaaagctgtagatcctgatgttactggagaaggatatcagtatggtccgctttatcaacaggaaaacctgaaggcttatgtgtttgcaagagacaactacacctgtcagatctgcggagctaaagccggccgggtcagaaaagacggcagtaccgtcaagctgatcgggcatcatatcaattatcgatccaacggcaccaccaataatccttcagggatcttgtctgtttgcgacaaatgccatacacaggctgatcatcaaccaggcggaaagctctatcaactgatgatatccaataagaagatcgcccgtggattaagagatatgacaacagttaatatcgttgtgtctcaattacgaaagatgtatccttcggcattcttcacatacggcaactataccaaggctaatcgcgatctgatgggattgcttaagtcgcacgccaatgacgctgtggctatcgcgaaatgccaggacatcctgtttacgggaaatctgaccatctgcgattgtaatggaaccgtatattacaagcaggttcgtcgcaaaaagcgttctttgcatgaagcgaacccccggaaaggccgtaagactcttaaccgcacagcaaagcgttattccaagaatacgaagcgtgtgaagggctatgacctatatgccaaagtgacatatgatggacaactcggttacatatccggctttaccggtacaagcgcctatatccaggattgggaagggcgttacatcagaatgcagaacaaaacatatttgaacatttcgctatctaaattacacaaactggataacggccacaattggctgtcccgattcatcccctccctatag

SEQ ID NO: 1348 - DNA, 299 bp, Erysipelotrichaceae bacterium sp.
gtcaattacccaccacttagaacctgatggttcctgaagtgggggcttgtgaaaacaagtcggttgactagcctgagatcttcgagatctacgtttgcagagttatgactctacccgatggtacccaagtcggtatgagtccgagcaacgaatgaaggagatgggttccctgaatcgactcgatgcatcaagcgctgcagacattggcgatgggtgctacgtgcggtggacacggacagaacagtgttgtatctgtcgcaaatcaccaacttatagaaaaggaggcgtcagtcatgaag

SEQ ID NO: 1349 - DNA, 708 bp, Unknown
  Ga0265594_1010503 JGI
atggtagtttttgtactcaacaaacatggtaaacctttgatgccttgcactccttgcaaagcaaagaagttgttaagaaacaaaagagcaaaagtagtaagaaagactccattcactattaaattacttggttggtctagtggttatgttcaaaaagtaacagtaggaatggatactggcagtaagaaggtaggagtagcagcaatatctaataacaaagttttgtatcaatcagagataactttgagaaacgatattgtaaagaagatgaaacaaagagcatcttatcgtagaacaagaagagctagaaaacttaggtatcgagaaccaagattttcaaacagaggtaaaaaaggttttcttgcaccttcaatgctttctaagattaattctcatttaaaagagaagaaatttgttgaaagtattttaccagtatttgaatggatattagaaacagcaagttttgatattcataaaattacaagtccaactgtaaaaagtaaaggttattgtaaaggaattttaaaggattattataatgtaaagcaatatattttgcatcgagacaattacaaatgtcaaaaatgtaaaaaaggtaatttaaaattacatgttcatcatattatttttcgttctgaaggaggtacaaacgaatcaaaaaatcttatatgtttatgtgatgaatgtcatgataaattacataaagga

SEQ ID NO: 1350 - DNA, 242 bp, Unknown
  Ga0265594_1010503 JGI
gtgaactacccccaccttaaaggtggaggcttctaattatcattaaggagtctggttcaccagaacactaacaggagaaaagtaatacaatgttagtaaacgataggaaagaaattaggtaccttggaatgtcacctcagtttcaagctctacggatacagattaaacaactttatagggtaataagtagtgtttgtatcgtaaaacctttccatatctgttcgagaggaagtcggattcta

SEQ ID NO: 1351 - DNA, 1515 bp, Unknown
  Ga0310786_10003093 JGI
gtgctgcgcgttaaaaccttgtataacatcggcgatgtggaccacagagcgttaggctctgcattatccgttaaatcggatcaaaaagacgaaaggggacgcagaatcatgacaatattcatcatcggcaaaaacggtgaacggttgatgcctactgtcagatgcggacgtgtccgccatctgttacaggatggcaaagcaatcatcgtaaagcatgacccgttcaccgtacaattaacgtacggaagcaatgaatacgtgcaggatattgagctgtgcatagactccggttacgaacacgcaggtgtgagcatgaagtccgacgcacgggaatacgtttccgcacagtacgatatgctttcggacgaaaaacagcggcacgacgatcaacgtcgctaccgcagaacaagaagaaaccgcaaacgctatcgcaaaccccgtttcgataaccgcaacaaaccgaaaggctggctcgcaccctctatacaacacaagaaagaaacgcaggtaaggttgatagaacgtttcgtatcagtcgcacccgtaacatccataattgttgaggtggggcagttcgatcctgccgtactaaaagcgatagaggaaggtacttctatcccggagggtacggattaccagcggggcgaaagatacaggttcgctacgctgagagaagccgtatttcaaagagacggatacaaatgctgtttctgcggaagagggatcaaagagaacgcgatcctgtacgcgcaccatgcactctactggaaaggcagacatgctgatcgtgtgagagagctggccgcttgttgtgagagatgtcatacggccgctaaccaccatcgaggcggaaagctttggggatacgagccaaaggtttccaaacttgagggtgcatcttttatgaacgcggtacgatgggcaatcatcaatgagttgaaagccaagttttctggatacgtacactttacatacggagtaacgactaagctgaaacgccagaccctgaggatagaaaagtctcacatcaacgacgcttatgctatggggaataaacatccagaaaaaagggcgagtttcgagcattacgtcaaaagacgcagaaacaatcgttgtttggagttgttctacgacgccaaatacattgatttgcgcgacgggaaaactaaagcaggcaaatccctcggatgcgaacgtactaaccgaagagagccgagaaacaacgaaaagagccttcgcaagtacagaggtcaaaagatatccaagggaagaagaagtatacgcaaaacccattacacgatacaaccgggaacactcttgtcgattaacaacgagcagtatgtagcaaaaggttgtcactgtaacgggaaaagcgtaatgcttacgaatggcaaaagtgtcactgtttctaaagccagagtattaaaatacgcatctgggtggatgcaaaaaaacataacgaaaggatgcgccattcctcccaccttttacgaagtgggcttactggcgcagtag

SEQ ID NO: 1352 - DNA, 282 bp, Unknown
  Ga0310786_10003093 JGI
gtcatgaaccaaccactcacgtagtgggcttgtatgggactacgagcgcatgattagcccaagtgctacgagcactacgttatacaagaatatatagtcactccgggatgctccacaagtcccggactctgaggtacagtattaaacatctctgagggtaggagaagtgtgctgcgcgttaaaaccttgtataacatcggcgatgtggaccacagagcgttaggctctgcattatccgttaaatcggatcaaaaagacgaaaggggacgcagaatcatgaca

SEQ ID NO: 1353 - DNA, 1296 bp, Human gut metagenome
atgccgaacaaagtgtatgtcatcaataaacacgggcgtccgctgattccctgctccccagcaaaagcccgtcatcttctggatgacggaaaagctaaagtcaagaagagaacgccgtttaccattcagttgatttacgggagcagcggatatactgaggatgtcatcctcggcgtagatgcaggaagtaaaactattggattatcggcaagtacagagcaagaagaactctttgcagcgaatgtaaccccacgcaatgatgtggtagatttactttctactcgcagagaattccgaagaaccagaagaagccgtaaaacgcggcatcgtaaagcacggttcaacaaccgtgttcacagcaagcataaagggtggttagcgccatctgtagaggtcaaaatccaagaacatattacctgcattaagagagtctgtaacattcttcccatcagcaaagtggtcgtagagaccgctgagtttgatttgcaactgctgaaagccgttgaagaaggtaagcctgtcccgcaaggagaggactaccagaagggagaaatgtacggacactacaatgtacggcagtatgtgctctggagagacggctatacctgccagtgctgcggtgctcattctaccaagaagaaagatgtcaaacttcacgttcatcatcttgagactcgtaaaactggaggagatgctccatccaaccaaattaccctctgtgaagactgccaccagaagctgcacaaaggattgattcctgcggcagacttcaaaaagaggaagcgtaagtctaccagagatgctgcttttatgggaatcatgagaaataccttgatgcagaggcttcgcagcgaactaccgattcccgttgctgaaaccagaggttatattaccaaggcaacacgagaaaagctgctggtactttctaaaagccataccaatgacgcactggcaatcgcccaagggagacatggcttcaatgtaggatatctccagagcatcccacaaaataacaggatttatacgattcgtcctgtaagacaccacaatcgtcaattacacaaagcaaccgttttgaagggcggcatacgacgggtaaaccaagcagtaaagtacgtctacggattccgcctatacgacaaagtgcgatataacggtgttgaatgctttgtctgggcaagacgagttatgggctatttccgactgaggcatcttggaggagaaaatgtcaaatgcggtgctaattataagaacctcgaactattagaacgcagtcaaaactatttgatcgcgtaa

SEQ ID NO: 1354 - DNA, 314 bp, Human gut metagenome
gtcaattaacccaccgcttaaacgctgaaacgttttgaagcgggggcttgcggtaaaagtcgtaagcctgattgactaccctaaacacttcgggtgctacgttactcaagaatgtatgtataggcaccggtaggcgttcatccgaacctgccgctctgcggtgtatgattaaaagctctgagggtaaggagcggtgttgcgcacgaaaaccttgagataacattggggacggatacctgacagtcgaaagactgcgtggttttctattaaccacaataatctacaaaaaggaggaaggcatcatgccgaacaaa

SEQ ID NO: 1355 - DNA, 750 bp, Unknown
  Ga0302213_1000513 JGI
atgacaaattattgttatgtaattgataaaaacaaaaagccacttgagccaactaattataataatggttggagattggttagaaagaagaaagcgacattagtttcaatgtatccgtttgtgattaaattagaacgagaagttgaaacatcggaagtaaattttaatatatgtggtattgataccggaagtaaatttactggaattgctatcatttctgaatgtaaaaccataaataaagttttgtttaagggaaccatagcccatagacgagacgtaaacaagttaatggaattacgcaaaggacaaagaaaatatattggatatgctcaacattgtatgcaaggcaaaacttatctcagagaaaatttgctaaagatatatccaattgaattaacgattggttcagaaactgcgaataaacgcattgattggtgcattgagaaatcacatagtaatgatgcgattgttattgctggaataaaaccgtacaagtgtgatattcaagattgggttataaaaccaatgcgaaggcagagcaaagccaaaacggacaatgtattgggaattaaacacaaagatttggttttatacacatataaaaatggtgaaacacatattggatatgtgacagcaatttatccagaactaaatgctttgaatcttcagtcatcatcaaaacattgtaaaaaggttaacgctaaaaagtgtaaatttatatggagatttaataaaatttattggatgtag

SEQ ID NO: 1356 - DNA, 286 bp, Unknown
  Ga0302213_1000513 JGI
tagataaacgtgtacaatagtggacaaacatctattactcgcggacagctgatgaggtttcacgcctaagtgaatgctatcaatgaaaattgcttgcatgatgagctacgatcgtataaatgccaaagacacaccctcggatgtaatcttcagtccgttgctctgtgagtataaaggatgaccgacttctaatgtcctgaagtcaaacaccgaactacatgtgcattatattgtcattggcaagaagaaaatactgcgaaagcgagagtagtcagagatgacaaat

SEQ ID NO: 1357 - DNA, 1350 bp, Unknown
  LO132_10002610  JGI
gtggcgcgtgcccggccgggcaatccccggcgtctcacgcgcaagggaaaacgccagatgtcacaattggtatacgttctgcaccaagacggcacaccgctgatgccgacccgtcctgcaaaggcccgccacctgttggacgcgggaaaggcggtcgtggtacagcgcgacccgttcaccatccaattgaaggtgctctccggcaagcacgtccggccggtcacggtgggtgtggacatgggagcaaaggtggtgggagtagccgccgcaggctccgggcgggtgctgtaccagggagaggtgatcctgcgggacgacatccgtcggcggatggacagacgacgggcttaccgtcgcgcgcgccggagtcgcaagtgccgctaccgtgcccctcggttcaacaaccgccgccggccggcgggatggctgccaccctccatccgctcgaaggtggacacgacggtcaaggtcgtgcggcgagtagcctctttcctgcccgtctccctcatccgggtggaaatcgtcaacttcgacacacgagcgatgcaggccgggggaagcagattgccgggatgggcttatcagcgcggggagcagtacgggtgggaaaacgtcaagatgtacgtgcgtgcccgcgacgagtacacctgccggtattgcggtgcggtgatgccgcccgacctggaggtagaccacgtcgtaccgaggagtcggggtgggacagaccggcccaacaacctggtggcggcgtgtcacgagtgcaaccggcgcaaggggaatcagacggcgacggaattcagttacccccaggtggcagaacggagcgggcaatcgtttcgcgtggcggctcacacccaggtgggcaagatggctacgctggatgggctgaccgaaatcgccccggtcgagaccacctacggctacgtgacgaaggtagatcgggaagcgatgggtttgccgaaggcgcactactacgatgcggtagccatcgcgtcggcggggaagccggtcgaggtgctgggggtctacgaggcgctgcgggcggtggcacggggggcataccggcaacgcaagggagaccgttcccacctcgttgccagcctgccctacgaggtgtttggttttcggcagtgggacagggtggcgctaccagacggaggagtgggattcgtcgagggacggcggtcgagtgggtactttgccatctccgatctggaggggcaactgattgcaccgtcggtcaattgcaggaggctgcggcttgtcggccgagccggtgcacttctgacgggaaggaggagggcggcttcccttcgggctgagcctcagggcgaagcctcccccgactga

SEQ ID NO: 1358 - DNA, 360 bp, Unknown
  LO132_10002610  JGI
gtcaaccacccccgactgaaagtcgggggcttgtaggggagaccttgcaagccccggttgaccggcctcagcccgtttcggctcaggccgatatagtcgagggctacgttgtcggcaaggctaagacccttaccaacgccttttggccgcgataggggacgtaccctgggatgctccctcagttccaggctctacaactaccggttgcagacaggctgaaggggtaggcgcgaaacgggccggtagatatgcggaccgacaacattggcgagggggacctgacgggtggcgcgtgcccggccgggcaatccccggcgtctcacgcgcaagggaaaacgccagatgtcacaattggtatac

SEQ ID NO: 1359 - DNA, 1227 bp, Human gut metagenome
atggtatatgtgttaaatataaacggtgaacctttaatgccaaccgaacggtacggtaaagtcagacgaattttaaagtccggcagagcaaaggtagtaaaaaggacaccgtttacaattcagttgttgtatgaagcaacaaactgcacccagcctgttacattaggcgtggatgcagggtataaacatatcggcttgtcggctacgacagaaagtaaagaaatatattcaagtgaagttgttgaacgctgtgatatagtcaatttacttaaaaccaaaagggaatgtcgtagaacaagacgaaataacaaaacacggtatagaaaaccaaggtttaataaccgtgttcgcagtaagcataagggttggttagcaccttcagtagaacataaaatacaaacacatattaaggttatacaaaatgtgtgcagtatcgttcctgtaaccaaaattcgtattgaaacagctgagtttgatgttcataaaatcaaaaaccctgaagtacagggaatagggtatcaacaaggcgaaaagtacggctttgttaatacaagaaattatgttttgtggagagataaccacacttgccgatgctgtggtaagtcgaaaggcgtactttttgtggtaaatgctaaaggtataataacagtagcacctgaagatttgtatacggtgtgtaaagaatgtcttgataatcatattaaaggtattaaacctttaaagttcaagaaaaaaagacattttgcaccacctacacaaatgggtattatgagaaacactcttcttgacagactgaaaaattcagtaaatgttcctgttgaaaatacatacggttatgtaacaaaaggcataagggaagagtatggtattaataaatctcatacaaacgatgcctattgtattgcaggcaatttacaagcaaaaagattaaacgaatattacctacaaaagaaggttcgttgtcataacaggcaaatacataagatgaacactctcaaaggtggtaagaaaaaacttaaccaagcaccgtatattgtaaaaggttacaagctaaatgataaagttttatatgataatcaaatttgttttatatccggcaggcgtacttcaggatattttgcaataaaggatatattcggcaaaactttatcaagttctgtaagctacaaaaaattaaggctgttggaaacagctaaacactatactttagaaaggattgcaaggtaa

SEQ ID NO: 1360 - DNA, 289 bp, Human gut metagenome
gtcaacgacccacgactgaagtcacggacttgtaaatttaacaagtcactttagttggctgcaaaagcagcttgttgattagcctaagtcttaattgactacgttatacaagaatatatagacacctacggattttacgccaagtctgtggctctgtggagtacgattaaagagttctgaagggtaggaacagtgtcgtgcatatgtaaaaaccttgtaataacattggcgatggcgttttacagcacttatgtgctgacttacagtaaatgaaaggagtaccgtgatg

SEQ ID NO: 1361 - DNA, 1230 bp, Unknown
  NODE_1723_length_10022_cov_2.7427 MG-RAST
ttgcgtaaaggcaagacacgctggctgtgttgcggtaagggacttaaaccatttgcgggattatatccaatgcaaaatcaacgaattccggtcctatctccaagtggtaaaccattaatgcccactactcccgcaagggctaggaaatgggtagaaagtggcaaagccataggcaagtggtctgacttaaatgtttggcacgttcagctagtttctgagccttctggacatgaaactcagcctattgctatcggtgtagaccctggcaaatcctactcaggaatttcagcccagtctaagcacttcaccctatttcgttcccatgttgttctgccttttaacagagttagggcaaggatggatcagcgtcgaatgcttagacgtggacgtagggggcgaagagtaaaccgaaaggtggcatacaaccttcgagcccatcgtcaggttcggttcaacaaccgcagaagctccaaagttgcgccatcaattaaggcgtctcgggatactgagtttcgcgttgtttctgagctggttagcctttatccaatctctcagattgtttatgagaaagtgagagccgacgtagacctcacttcaggtcgcaagtctgcccgctctgggaaaggttttagcccagtgatggttgggcaacgttaccagctcgctcaacttgccactatcgccccggttgtcactcgcgagggttggcagaaagacggtaatggcacgtctcaacttagatctcgcttagggttgtttaaggacaaagaaaacaaaggcaaggcttctcctgaaactcacgcagtagatggagtcgctttggcctgctctgcctttgttcggtacggcaaaaagtcgctaaccgaatgtgggtgggctgggtctgtttctattactgattcagtcttcagggtcattactcgctttggagctgtaaagcgtggaaagcaatatggcttctatcgccgtcagctccatgtagaagtgcctgctaaggctgctgttcgcaagcgcaaaggaggaaccatcactccgtttggcgtgagggtcggcgactttgttcaagccaccaaggcaggagaaaccattactggctggattggcggcttcaccaatacagaaaagtctcaaaagctttctgtctacgactggacttggaagcgtattgggcaattctcaatctcaaaagtaaaactactcaaaaggtccacaggattatgtgttgtctag

SEQ ID NO: 1362 - DNA, 319 bp, Unknown
  NODE_1723_length_10022_cov_2.7427 MG-RAST
attatgccctttcatccgctcgagcgccgagcttcggtgaccttctaaaatgctttcctcactcactttcgcgttatcccacagacgatacgccgctttcgtccttccccaatctccgctcgcctggggcacactcgcctccggctgctgagctaggtcctcttcaatctacaatttccatcaagcggcgattcagccgcgcatctcctaaatctgagcttctcagctcttgcttggcccaattctgcatgattcctgcctgctcctggctggcgctactcctttcagaataactcatgccttggatctctcaaagtca

SEQ ID NO: 1363 - DNA, 1191 bp, Unknown
  Ga0194137_10001287 JGI
atgacgtacaataagcaaggccagtgtaaggaaaggtggataccggtggtgtcctccacgggtaaagcattgatgccttgtcaccctagtagagcgcgtaagctagtagctaagggtaaagcagttaagaagtggctcaaaggcttcttctacatccagttgctggatcgtgaggacggcgacacgcaggagatctgcgtaggcgtagatccagggagtaagcgagaagggttcacagtgctctcaggcacacgcaccttcctcaacatcaacgcccacgccagagatggaaaggctgtcaagaaggcgatagaaaaacgcgctaatgcacgtaaaactaggcgtagtaggaataccccgtaccggtctcctaggtttaacaaccgttctcgtgaagactggataccccctagcactaaagcccggtggcagctaaaactcaacatcgtgaagcacttgatgaggctttacccgatcacgcgtgtagcggtggaagacgtggccgcagtcagtatgaaaggtggttatcgttggaacaatagcttctcgcccatccagacgggaaagaactatttctacaaggagttagagggtctaggtttaacactcacacagttcaagggcactgaaaccgcctctctacgcgctgcgctagggttgcgtaagacctcgtctaagctagctgaagtgttttcagcccactgtgtggactcctgggtgctcgccaaccaggtgttaggtcaacgaatcaccgtagacctaactgaactggttaccttgatcccgctggtctacgcccgtagacagctccatgtcttcaactgggctaagggaggtgtacggaagcggtggggtagtacgctgtctttaggacttcaaaagggtacgctatgttatcaccctaagtggggtaaatgctacctcggtggtagtgacggtgataagagagtgtcgcttcatgcttacagtaacaccaagcggctagcacggaacgttaagctggaagacacccaggtagtagcccactcaccctggcgactgttagacactcccgcgatgacgacacatcacgaaaagaggatcaggaggctaaacacactgtgcattagactcgcaacactaggcacgtcagactccagagtgtttcgcgcactcaagtcgggcacacccactcaccaaagggcagcatag

SEQ ID NO: 1364 - DNA, 258 bp, Unknown
  Ga0194137_10001287 JGI
gtcaactaccccttcctaaccgaaggggcttgtaacgagtgaccacatcgctctaacaggactaaacagttgactagcctatgaccctagaggtcaaactgaacgaccttcgggtggaaccgagacgcacctacggatgcttccctagtctgtagctctgtggtcgtcagtggcgaagggaccttaacatgacatcattgatcctgtagaggactgaacatgacgtacaataagcaaggccagtgtaaggaaaggtgg

SEQ ID NO: 1365 - DNA, 1350 bp, Unknown
  GENOME_ACESSION: mgm4547164.3 MG-RAST
gtgttaaaacagcagttacaagtaaagaaaaagaacatacctacggattcttcacaagttcatagctctataattcctacattaaacgagtctaaagacacagtgtgtaggaaagatactctggcttgtaacaactccgatgtgaatctacctgagtctaacaggattgagagaaatacaaaagtatttgtcctcaatgtaaaaggacaaccactaatacctacaactccttgtaaagctaaatatttgattaaaaaaggattagctaaagtagttaaagcatatccattttttgttattaaaatgttagtaaaaacaaggaattgtaagcaaaatgtagtattaggagtagatagtgattatcaaaatattggatttagtgcagtaagcaataagaaagagttaattagtggaactttggttttagataataaaactaaagatagattaacagaaagaagaatgtatagaagaagaagaagaaataaactttggtatagagaagtaagatttaataatagaagaagaaaagaaggatggttacctccatcagtagaaaaaagatatcaaactcatttaggacttattaataagattaaaactttgttacctattagtgatgtagtaatagaaacagctaactttgatatacagaaaatagaaaatcctaatattcaaggaaaaggataccaacaaggagaacagttaggatttgaaaatgtgaaacaatatgtattaacaagagataaaagaacttgtcaacattgtggtaaagataatactaaattagaagtccatcatattaaatttagaagtcaaggtggaactgataaaccatctaatttgataacattatgtagtaaatgtcataaagatttacataaaaataaatttagtataaaaagtattaaaagagattataaaccaaatacatttatgtctattattcataaaagattttggaaggatataccaacaatgtatgaaacatatggttatataactaaagctactagattaagtttaggattagataaaactcattataatgatgcattttgtatagctggtggaaatactcaagaaagagtaaaatcaatagaattaaagcaaaaacataggaataatagagtattacaactaaatagaaaaggatttaaaccttctattagaatacaaagatataagatacaacctaaagatttagttaaaattaataataaatggtatataacgaacggattacattgtaaaggaacaagaattatgataaataaaaagtcagtaaatataagtaatattagcaaatattttaatatgggaggtatgttcttttcctcccaaagttaa

SEQ ID NO: 1366 - DNA, 259 bp, Unknown
  GENOME_ACESSION: mgm4547164.3 MG-RAST
gtcagctacctaaaactaaagcattgggcttgtagtgagaactacaacgtaagagttgattaggaggttttagaaggtgttaaaacagcagttacaagtaaagaaaaagaacatacctacggattcttcacaagttcatagctctataattcctacattaaacgagtctaaagacacagtgtgtaggaaagatactctggcttgtaacaactccgatgtgaatctacctgagtctaacaggattgagagaaatacaaaa

SEQ ID NO: 1367 - DNA, 1293 bp, Unknown
  Ga0373632_0083918 JGI
atggcagtttttgtatgggacaagcgtaaacaaccgctaatgccttgctcagaaaaacgggcaaggttgttgctgatgcgtggacatgccgtagtggttacacactatccgtttaccattcgtttgaaaaaccgtattggcggcgaaatccagccgttgcgggtaaaacttgaccctggcagtcgccatacaggcatggcgttagttcgggaggataaagaaaaactcacggtcttgaatttgttccagctcaatcatcgtggtttgtcgatcagtgaaaacttaacctcacgccgtgttatgcgtaaccgtagacgcggtaacttgcgttatcgtccgacgcgtttcaacaaccgcactaagccgcaaggctggttagcgccctcgttacaacaccgtgttgatacaagcataagttgggtgaacaaacttcaacgccttgcccctgtgacagcgctttcccaagaactggtgcgctttgatatgcaactgattaacaaccctgaaatcagcggcactgaatatcaacaaggcgagttgcaaggctatgaggtacgcgagtacctgttggaaaaatggggcaggcaatgcgcgtattgtggtgcggaacacataccattggaaattgaacatatcgtgccaaaatccatctgtggcagtgatcgggtgtctaatctgaccttggcttgccgcgcttgcaaccaatgcaaaagcagccaacccattgaaactttcttggctaaaaagcctgtattattgcagaaaatcaaagcacaagcccaacgcccattgagggatgccgcagcagtcaatatcacccgctgggtcttagctaagcaacttaaagcaacaggtttacccgtagaattagccagtggtggcaggacgaaattcaaccgcataacccacggcattcccaaatcccatgccttggatgcggtgtgtgttggcgaaatagtcgcggttgcccattggaacattcctaccttggaaatcaaatgtactgggcgcggcagctatcaacgcacccgtttggacaaatatggtttcccgcgtgggtatttactgcgtcaaaaagcggtttatggcttccagactggcgaccaagtgaccgccaatgtgaccaaaggtaaaaagacaggcacgtataagggacgtgttgcaatacgtgccagtggttttttcaatatcaccaccgcaacaggtatcgtgcaaggcattagccacaaacattgccaactaatcgctcgtaacgacggttatgggtatatttttcaactaaaggtagcttaa

SEQ ID NO: 1368 - DNA, 293 bp, Unknown
  Ga0373632_0083918 JGI
gtcaactaccccgccctaaagggcggagcttgcaagagctaggttgaccagactcagtgctgcaaggcactacgcagataagaggtcgttaagacttaccaagggatgcttccttagtcccttgctctaaaaggtcgtgatcacgctggcgcaaggtaaaacgccgcaggttgccgccgacactgagcgtagctgaagtgtgagccgcttatctgcattgtcgaagggagattacgggaaaccgtagcgttactagacccgtaagggtaactatttgaggcacaacaatggca

SEQ ID NO: 1369 - DNA, 1392 bp, Unknown
  Ga0172378_10001289 JGI
atggtatttgttattggatataatgatatggcacttatgccatgtaaagaaagtaaagcccgtaagctcttatcaaatggcagagctacggttatacataaaatgccatttactataaaacttttatacaaaacaggttgtgctacacagcccatagaacttggaatagatactggtacaggcaatatagggattggaattacttcttgtaaaaaggttttacacaaagctgaagtgtctcttagaagtaaggatatagtcaagttgcttactactcgccgtatatatcgtagaagcagacgttctcgtaaaacggaatatagacatccaaaattccattatcagacaatctataaatatgttggtttgcttgtaaaacgtcaacataagattggtaaatcaacaaagagcttgtggtctaaggtgtccataaatcttatgtccaaacgccctgaaggatggctgccgccgagtacacaatcgaaggttaatgcacagattaagtggattgataaatatctttctatattaccacatccgtcattaacaatagaagttggtcgttttgatatggcacgaatgaaaaacccaactgtacataatgaactttatcaatatggggatatgtatgattatgacaatatcaatgtttatgtatttgcacgtgataattatacatgtcaatgctgtcatacaaagtcaacaccgcaaaacaatttaaagcttgttaatcaccatatcatttatcactcaaaaggcggtagtgatagaccgagtaaccgtatcacgatatgtgaaaggtgtcatacttctcaaaatcatcagccgggcggtatcttatatgattggatggtaaataaacgtaaggttgctaaaacttatagtgatgcaacacaaatgaatattatacgtagacgtatgttcaaagcatttccgcaagcaacttttacatacggaaatatcactaatcctgatcgtaagaaattgatactttcaaaaagccattgtaatgatgccatagctattgctcagcaaggacaggtaacaaatattcatgatatacctactgtattgtatataaaacaatcacgtaaaaagaaacgctcattgcatgaaggaattccacgtaaagggcgtaaaacacctaaccgtgcacagattcgcaacagtaagaatacaaaaactgttggtaccttccatctaaacgactgtgttaagtttaacaatcaaatcgggtggataagcggattttctggtaaatctgcttatgtaaaaggtttacaaggaacatatattcaagaagtaggaaaggcttataagcttatatcactatcaaagcttagtaagataggaaatgcgggcaattggctatatcaatacaagatagcctaa

SEQ ID NO: 1370 - DNA, 291 bp, Unknown
  Ga0172378_10001289 JGI
atgaattaccgagcatgaaaatgcaaagtatttattacagctaataacttggatgactagcctcagtcctatattggactaagttatgaatgtcaatacatattggtacgataccctaatacctctaaatgtttaggctctgtaaacagttttgtcgagacgaaacagtcaacctaaagcacgaaacattcataaccttggcgaagggtacttacgtgaaataacacacgggcagatcagttttgtatctgccgtaaagttataacttgtagaaagggcaggtgttatatg

SEQ ID NO: 1371 - DNA, 1254 bp, Human gut metagenome
atggtatatgttttagatattaacggacatccacttatgcctacagaacggcatggaaaagtaaaacatcttttaaaaaacggaaaagcaaaagtagtcaaaagatgtccgtttacaatacaattattgtataaaagtttgacttatacacagtctattatattaggtgttgatgcaggaagtaaacatatcggtctttcagcaacaacgaacgataaggagttttatgcttcagatgtagaacttagaactgatatagtaaaacttatatctaaacgtagagagttaagacggagcagacggaatagaaagacacgttacaggcaagcacgctttgacaacaggaaacgaaaagacggatggttagctccgtctataagtcaaaaaatcaaatgccatataaaagtagttgagaacgtacacaagatacttccgattacaaatattgttgtagaaacagcatcatttgatattcaaaaaattaaaaatcctaatattaaagatactgaatatcagcaaggcgaacaacttgatttttggaatgtcagagaatatgtcttatttcgtgacgaacatatatgtcagtgttgtaaaggtaaaactaaagataaaatccttaatgttcatcacatagaaagtcgtaaaaccggtggtaatgctcctaacaatttaatcactttatgtgagacttgccacaaaggttatcacaatgggactgttagattacctaaaactattaaacgtggaataatttttagagatgctgcttttatggggattatgcgttgggcattttataataagctaagagaaaaatataaaaatgtttcaatgacttatggttacataacaaagaatacaaggattgaaaataaattaccaaaaaagcattatgttgatgccagatgtattagtggacaccctttagcaaaaccatctgaaatgatttactatcaaaaaaagataagatgtcataataggcagttgttcaaaataaatactttgaagggtggcacacgtaaaagaaaccaatctgaacgagtcataaaaggatatatactttttgataaagttaaatatcagggtaaagaatattttgtctttggtagacgtataagtggattttttgatataagagaacttaatggcaacaaggttaacaaaggaagtataaattgcaaaaaactcaagctaattgaaagatgcagtggttatttaatagaattaagaaaggagacggtgctcctctcatga

SEQ ID NO: 1372 - DNA, 280 bp, Human gut metagenome
atgtcaataactcatgactaaagtcacgagcttgtaaaagcccgatattgaccagcctaagtgtttagtacactacgttaaaagagaatatatagttacctgtgaatgtttatccagttcgcagctctaaggtcagtggttaaacagttctgtggagtaggaacagtgctgctgatataaaaccttttattaactttggcgagggtaacttaacttctttaattttaaaggagcattatgtattaatttacatcatttgagaaaggagtgccgtgaaatg

SEQ ID NO: 1373 - DNA, 384 bp, Unknown
  Ga0395718_011872 JGI
ctgcttcaagtcagattccccggctaccgacagccccgcttcgacaaccgcaggcggatggagggctggctgcctcccagcctggaaagccgggtggccaacctgcagacctgggaaagaagactggcctggtttgctcccgtggaaagcatctcgatggagctggtgaagtttgacacccaggccctgcagaacccagagatctccggggtggaataccagcagggtgagctgatgggatacgagatccgggaatacttgctcgaaaaatggggccggaagtgcgcctactgcggcaggacagaagtccccctggaagtggaacacattgtcccgaaaagccggggcggctcgaaccgggtcagcaacctgaccctgtcctgc

SEQ ID NO: 1374 - DNA, 293 bp, Unknown
  Ga0395718_011872 JGI
gtgtactcgtggtcctgcgctcgcacttcatgcttttctgggtccagtttcatgtagatgcggaagaccttttccagtttggccttgccgaagatctcataccagctggcatccacgatcttccattcagccaccaggtccacaccttcgggttgtccatccacaatgtggaatggcgcactgtcacggttcaggcccatcaggcgcgtcttggtttcatcggcgctaagcgcggcggtatttccggcgggtttctttccaaataacggcatgtcacacctctctctatatta

SEQ ID NO: 1375 - DNA, 1305 bp, Unknown
  Ga0208461_1004216 JGI
atgattagtaatagaaattcaatacgagtatttgtattgaacaaatataaacaaccactaatgccttgccatccggcaagagcacgtaaactacttagtaaaaaagaagcagcagtatatcgtagatatccatttacaattatacttcgtaaagaaactactaatttcactcaaccgattgaatttaaagttgatcctggtagtaaagtatctggtatcgctttagttagtaacaacgtccttttatggggcgctaatcttgagcatcgtggacatcaaattaaatctgatttagattcacgtagaagtattcgtagatgtagacgtaataaattacgttatcgtcaaccaagatggtctaatcgtaaacgtgaaaacggttggcttccgccatccttaatgtctagagtagataatataactaatttatgttatagattaagtaaacgagtaccacttacaaatatcgtaatagaaactgttaaatttgacatgcattctatgcagaatggatgtcaattatatggtactgagtatcaacaaggtactttacaaggatataatgtacgagaatacttacttgagaaatttcaaagagcttgtgtttactgtggcgaaactggtatacctttagaagtagaacatattataccgaaatcacgaggaggtactaatcagattagtaacttaactctagcttgtaatagttgtaatacaaataaaggcagtagcactgcaagtgaatttggttatccgaatgtacataaactagctcaaatgccactaaaagatgcagcagcagttaatgctactcgtaatcgtattggtaaagatcttaatttaagtggattgccagtagaattaactactggtgctcaaactaaaatgaatcgtattaaactcggtttaagtaaagaccattggattgatgctgcatgtactggaaatactggaagtaatatagttttcccaagtactaatatgagtatactcaatattaaagcaatgggtagagggaatcgtcaagtacaattaatggacaagtatggatttcctcgtaaaactaaaactaggttaatacaacctaaaactgttaaaagagttcatggattctctactggagatatagttaagttaacacaacctaatcatagtatttatgctggagtttacgttgaaagaattactgcaattcgatctagaggtcagctaagtattaaatttgacggtatgagtattgattctaattggcgtaactttaagttacttcaatacaacgatgggtactcatattcaacaatataa

SEQ ID NO: 1376 - DNA, 294 bp, Unknown
  Ga0208461_1004216 JGI
gttgtccatcaactgcccctaattaatttcatgctcatccagcttaagtaatacttctgtattactacgttaattacgaatgagaatttattctcaaataggtactccaggatgcatctccagtccgggactctacggtaacgtattaaacaacacagaccgcgacaatgggtagtgtacattacaataaaccgtaattaacattagcgaggagaccttgacccttcgagaagactaatcccttacgggattatcataggaagtaatatgattagtaatagaaattcaatacga

SEQ ID NO: 1377 - DNA, 324 bp, Human gut metagenome
atgtccgtttccgtttttgttttggacaggaagcaccggcctctgatgccgtaccgacccgctcggacgcgaagttatctgacgcgtcaaaagcgcgttcacgggttcgccacgggtgacatggtgcgggccgaggtcccctcggggaaggaggtcggaacctatccggttcgcgtgactgttctaaatagcggctctttcaacattcagacgcccgaaggcatcatccagggtattggttggcgtcattgtcaacagctttcttacaacgacggatacgggtatgcgtggcttcgccccgcaccccattcctcccccgtttga

SEQ ID NO: 1378 - DNA, 278 bp, Human gut metagenome
gtcaaccacccctccttgaaaggagagacttgagcaatcaagccggttgaccggcctcagtgatccgaaaggagaactacgttgtcgtcgggttacaagacccgctccggggggcttcctcagctccgaactccggaaacggcagaagcagacaagcttcgggcaagtacgaagcggtctgtcgttgcaatgccggacgacaccattggcgaagggaattccgtcttttcggcggcccctccgattaaccgtaaggtttaccaaacatgtccgtttcc

SEQ ID NO: 1379 - DNA, 1293 bp, Unknown
  Ga0137392_10005405 JGI
atggagcaatccatcatttatgttctcgcacagtcgggcaagcctctgatgccgaccagaaaccgcaacaaagtgtggtattggctccgcagaggactggcccgagtggtcagccgtgagccattcacgattcaactgcgctttgagaccaccggctacgcccaaccggtcacggttggggtagataccggctcgcagacggtggggatcgctgccatcacccagagcgaggcagtctaccaggccgaggtccatctgcgcgacgacattcataacaagctcatacaacgacgaaagtcacggcggaaccgccggagccgcaaaacgcgctaccgcgcggttcggttcgccaatcgtcgtcgcaagccaggctggcttgcgccttcgctgcgctccaaggcagaggccacagtgaaggctgtgctctttgtggcacggctgcttccggtgtgccagatcaacgtcgaagtagggagtttcgacacgcagaagatgcaagatcccgcagtaacgggtctggagtatcaacaaggccagatgcaaggttacctggtgcgagagtatcttttacggaagtggaagcgcacgtgttcgtattgtggcgcaactggccttcctctacaggtggaacatctcagtcctaaaaccagaggtggttcagatcgcatctcgaacctggtgctggcatgtgatccttgtaacaaaaagaagggaacacagacggctcttgagtttggatttccgcaccttcaggcgcaggcccgtgtgccactgagagatgctgcccacgtgtcttctatcaagactgccgtggttcatcagctcgttcagcagttcggaccagatcaggttgctgtgacctatgggtatgaaaccaaatacaagcgtcttcagatcttccaccttcccaagtcgcacaccaacgacgcgattgctattgcttgtgcagtgggagaggtggtgcaacccgctgcaagcatttttcaccaccgctgtgttcctcgcgggaactatcagttgtacaacggtgtgcggagcgagcacaaggtgtgggcgccgaagaagctgcatgggtggaagctgtatgaactggttgaggccaaaggggtagttgggtatattggcggtagacgcatccaaggggcctttgtcatgaaagatgtggcaacaggcaagggtatcctcgaagtaaccccgcgcaaactgcggcggctggctcgcccctggcacagctggatcgttgcccggcagtcgcttgtaagaaaggaggagcgcgcttcctcccccgcctag

SEQ ID NO: 1380 - DNA, 301 bp, Unknown
  Ga0137392_10005405 JGI
gacctccaggctttgcctggaggcatgctccgaaagacccttggggtttgaggagcatgccgggttgaccagattgtgccttggagacaggcaggccgagcaagcgtgcgtcttgcctgtcgcagaaaaggctccgatagcaggaagtggtcaagcacctaccgagaagtgctgccccagcttctcgctctagaacggctttcttaaccagtggtgcggtcagccaccgtggagagccgacatcccgcctgctatcagtatcggggggaacgcttcactccgaaaggaaggcttatggagc

SEQ ID NO: 1381 - DNA, 780 bp, Metagenome
atggtgtatgtattgaatagaaacggaagtcctttgatgccatgtaaagaggcaaaggctagaagactgttaaagtatcataaagcaaaagtatataaaagggagccatttacgattcaattactatttgaatgtgaaaaccatatacaggatattacgcttggtattgatgccggtagtaagcatattggattgtcagcaacaacagggcaaaaggaattatatgccgctgatgttgaactgagatgtgatgttgtggaactgttatcaacccgcagacaatacaggcaagcccgtagaaacagattgagataccgggctccgagatttcataaccggatccattctaaaaacaaaggctggcttgctccgtcggtagaacagaaaatcaagactcacttacgggttccaaaagagcatattacagatgctcgctgtatatcagggaatccacaggcagaaccgctggggtattattttagtcaaaagaaggtgcgctgtcataacaggcagatccataaagcaaatattcaaaaaggcgggagcaggaaacgcaatcagatggagtatttagtaaaaggatttcgattattcgataaagtcagatatgataatcaggctggctttatctttggcagaagggcaagtggatattttgatataaggaagttgaatggcgaagtaatccatcgctctgcatcatataaaaaattagaattattggatacaagaaaaacattgttaacagaaaggagacaagcagtatctctcatggcttaa

SEQ ID NO: 1382 - DNA, 246 bp, Metagenome
ttccaggtcaataacccaccattaaaatggcgggcttgtaaaagcccttattgactagacttggtgttttaagcactccgttatgtaagaatatatagttaccagtggacgtacagcctaatccactgctctaagaatggtaattaaacagttctgacgggcaggaaccgtgttgccgttagtaaaccttatataacattgtctaaggctgcatgacttcagcatacaggaggatttaaaatcatg

SEQ ID NO: 1383 - DNA, 1257 bp, Unknown
  Ga0131092_10008720 JGI
atggtttatgtaattaacaaacaaggacaagcacttatgccaaccgaaaggtttggtaaagtaagaagactattgaagaatagccttgcccatgttgtgtgccgtatcccattcacaatccaattagattatgacacaactaactttacgcagcccgtaagtttgggcattgatgctggtagtaaacatatcggcatttcagcaacgacgagtgagaaagaattgtacgcagcagacgtagaacttagaaacgatattgtagagaaattatctacccgtcgagaacaaagaagaactcgtagaaacaggttacgctatcgcaaggcacgtttcagcaatagagtggcatctaagcataagggatggttagcaccatctgttgaaaacaagattcaaactcacttaaccgttgtagagaaaatatacaagtttctacctataactaatatcacagtcgaaactgcttcttttgatatacaaaaaattaagaaccctaccatatctaacgaagagtaccagcaaggtgaccaacttaatttcttcaatgtgcgtgagtttgtgctgtttagagataatcacacttgccaacattgtaaaggtaagagtaaggataatatcctaaatgtacaccacattgaaagtagaaaagttggtggagattcgccaaataatcttataacactttgtgaaacctgccacaaggcataccataaaggagaaatagaactcaaggtaaaacgaggtgcatcatttagggatgctgcttttatgggaattatgaggtggaatttctacgaaagattgaaaaacacttacgctaatgtgagtatgactttcgggtatatcacgaagaatactcgtattactaatggtttgccaaaaaaccattatgtggatgcgaggtgtataagtgggcatcctacggctaaacctcttggttattatttctaccagaagaaagtgcgttgccaaaacaggcaaatacataaggtcaattttcttaaaggcggtagaaagaaactcaatcaagcaccgttcttggttaaaggttttaggctgtttgatttggttgagtatcaaaaagagttgtattatatctttggtagaagagatagtggtttcttcgatattagaaaacttgacgggacaaaagtaaacaaaggctctattagttgtaaacaaatacgattgatagatacgagaagaagtataataacagaaagaaggaatagtggttcaattcctcccacaaactaa

SEQ ID NO: 1384 - DNA, 283 bp, Unknown
  Ga0131092_10008720 JGI
aaaaaaaatagatatgtcaactacccagaggctaaagacctcttggcttgaaaaagcccaagttgattagactaagtgatacccgaaagggttgaactacgttaggagagaatatatagttaccaagtgggtgtttgctcaagcctcttgctctaaggttggtgattaaacagttctgtgaggtaggaacagtgttgctaacgaaaaacctctccataacattgtcgatgagcatttaacggagaaatccgacttataataattattaaagtaagaccgaatg

SEQ ID NO: 1385 - DNA, 480 bp, Planktothrix serta
atgtctaattacgtctttgtaattgatccgaataaacagcctcaaaacccagtacatcccgcccaagctcgattgttattgaatcaaggtcaagctgctgtttatcgccgttatccgtttactattatcttaaaggagtcaaaaccagcaccagaaatacaacaaataaccctcaaaattgaccccggttcaaaaaccaaatttaaccgcactcgattaaacctacctaaaacccattggttagatgcagcttgtgttggaaaacttgaaactttaaaggtgttaaccaataaacctttattgattcaggcaacgggacgtggtactcgtcaaatgtgtggtacagacaaatacggatttccaaccttcccatgtttttcttgtgattatgctgaaaaactctatgctgagtcagttaggatagggatctgttcttcaggtcttatcgattcagataggttaaagtcaaagaatcattga

SEQ ID NO: 1386 - DNA, 249 bp, Planktothrix serta
gtcagcaccccgctctctttgtgacggggcttcatgcctccaactttagatagctcgtacccgcctcagcctaacggctacgttttctggatcataatacccacgaatgcgacgctagtttgtggctctattgttaacaattaaacagttttacgaggggtaagacagtgttgttaacgccaaaagttcagaaaacattggcgaagcgaacattaccctagaaataggagttatttcatgtctaattac

SEQ ID NO: 1387 - DNA, 402 bp, Human gut metagenome
atgccgtgccagccgcgcaaggcaagaatcttgctccgtgacggaaaggcaaaggtcatcaagcgcgagcctttcacaatccagttgaaattcggctccagtgaatataagcagaagattctcaagggcggaaaacgcaagctgaatcaggctgcctattccattcatggatttcatctgttcgacaaagtacggtttgctggacaagaatgcttcgtgtttggtcgccgtaccagcggatacttcgatcttcggaagctggacggaacagttgttcaccgttctgcttcttggaggcagttgcagaaaacctgcaatcgtaaatctatcttgattagtaaggaggtgatcggcgctcctcccacgactgaagtcgcgggtgtccgcgccgaaatatcatga

SEQ ID NO: 1388 - DNA, 291 bp, Human gut metagenome
gtcaattacccccgactgaagtcggaggcttgcaggaacgcgcaagcgtaactgacaagccctgattgactagactaagttctccgagaactatgttgccttggttatctcacccgtgggtgtttatcctagcctgcggctctgaggcggctctgtaaaagtcctaatgggtagggacggtcaaccgcgggacggccggacatttccggcaagccttggcaacattgtcgaagggtactttactcgttttgagccgctccggcggcgagaaaggaggtagacgtcttgttc

SEQ ID NO: 1389 - DNA, 1395 bp, Unknown
  Ga0209200_1016766 JGI
atgaaagcttatgtattgaacaagaataaagaacctttgatgcctactactccggctatagcccgcattctgcttaaagagggcaaagctaaagtggttaagaaaacaccgtttactattcaactactgaacgattctacggggttcaaacaaccgatcgccggaggattggatatcggtgccgtgcatttagggtgtgcggccgtgtctgataaagaggttttgtatatgtccgaaacacttcttgaagacgattataccgtaaaacaaaagattcaacgaagaaagggattccggcggttaagaaggagccgaatcagataccggaagccgccatattcaagggcgatgatggtaagacttgctctgcaaaacagagttgcagaactaaagaaatcggaagtcgccgaactgtatccgaatttctcaaagaaaagaaaagtggcttttggcgatcaaagctcttttgtcgcaccatctgtacaaacaaaggtcaaccaccacctgcaggaaatgagaagggttgaaaaaatactacctgtatcgaggtgggtaatcgaaaccgcgaatttcgaccttcacaaaataacgaacccggaggttgccggggttggttatcaatatggcccacaatacaatttctacaatgtcaaatcatatgtcctcgacagagatggctacaagtgccaagtttgcggggcatccggtatcaaaaaagatggaaccgttttgaacgttcaccacatcgttccgaggagattatccaacagcacagatgatccctctaatctcatcactctatgtagctcctgccacaagaaagtacacaacaatgaagccaccttaaacgctaagccgatcaagaaagggaaacgccacgctacgttagctaacaccgttcgagcccgtttgattaaagctcttgactgtaagaacgttttgactacgtttggatatcaaacaaaattcaaaaggcaggcaatcttgggcttgccgaaagaacattacttcgacgcggtctctattgcgtttgacggaaccaaaaaaccaaaattgagcgatacggtttatcgtattcggagagtacccaaaaacgagtaccgaagagagcgtaggcgaaagaaaactgcaacgtccggaaaaacgtatcctgaggtaaaaatccgcggcaggtataacgggtataggaaatgggacttggttcgatatggtgatgtaactggttttgtaagatatttggcaacaaacaaaagtttagtgattacagaccttgacgggaacaaactactatcaatcagttctaacaaaaagcctgtaattcttcaagcgggcagccgttatccgacggtgataaaaaaagcacaagcccattgtataccacaacaaattcattga

SEQ ID NO: 1390 - DNA, 433 bp, Unknown
  Ga0209200_1016766 JGI
tcaaaggatacggatacgtttacctcgccgcttcccccacacacgtgtggacagtacatttgaaactctttttggaaaaagggaaatagtgcttcccccacacacgtgtggacagtacactacgttccaagcgggtttgagggtaatcagtactgcctatgtgtccacccacacgtgtctcttgcaaaagagatgggattccagactctgactggagaaatccagtctccgttagtaatgtcatgatatccgtgtatgccgcctcagtacacgttagtatcgcttagtgtctcaaaaaggcctgaagtggagggcccggccgctaagtgtaaaaagcattattaacattgtcgagaggacgtcgaatgttttatctggtaacaggataaaactacgcacaaccctttttataaggaggatttagcttatgaaa

SEQ ID NO: 1391 - DNA, 1090 bp, Oscillatoriales cyanobacterium
atattaactcaaggtaaagcagcagtttacagacgttatccgttcacaataatcctaaagtattcctgtgaaaaaccgcttaccaaatcgcacgaaattaagctcgatcccggctcgaaaaccacaggattagccgtattggaaggtgacaaagttatctgggcagccgagttagttcatcggggaaatcacatcactggtgacttagcatcccgagccgcaatccgtcgcaaccgcaggaatcgcaagactagataccgtcaacctaggtttctcaatcgtactcgcactcccggatggttgccaccgagtttagcttcaagagtatcgaatattgtgacttgggttcctgtaacagctatatctcaagaattagttaaattcgacacccaagcaatgcaatttcctgaaatatcaggaattgaatatactcaaggcgaactagcaggttatgaaatccgacaatatttgttagaaaaatggggcaggaaatgtgcttactgcggcatcaagaatacgcctttagaagtcgaacacattcacaaaggaggaagttcgcgggtgtcgaatctgactctggcctgtagaaactgcaatctggctaaaggtaatagagacatcacagattttctctcggaaaaatccgacattttatcaagggttttaaaatttgcttgcttgccattgaaggatgcagcagccgtgaattctactcgacgggcgctgtttgagaaactccaacacgggagggcaaactcagtacaatcgaactcgaatgggattgccaaaaactcactggctggatgctgcctgtgtaggtaaagtagaacaactggcggtactaagtaggcaaccactactgataactgccaaaggatggggcaaccgtcagatgtgtacgcccaataaatatgggtttcccagcaaacacagaaccaggtgcaagactttttttgggttccagactggagatatggtgaaagcaggtgatagcagttttgccgatcgggaaatttgcaggtactcacgttggtaggctggcagttagagagagtggagtctttgatttgaggacagcttggggaaaaat

SEQ ID NO: 1392 - DNA, 201 bp, Oscillatoriales cyanobacterium
gctatccaccaatcaccggacataacaggacaaccagtacctaaaggtgaagagatagccagcctcagttacaactacgttttcagggtgatgacacctacaggtactttccagcctgtggctctgtcgtcaatcgttaaacatctgtatttggttaaagaagtgcggttgactcaacaagccgatattaactcaaggtaa

SEQ ID NO: 1393 - DNA, 1092 bp, Unknown
  Ga0376086_0019836 JGI
atgattcgtgtcccagtagtaagtcaaaatggaaaacctttaatgcccaccaaaagctcaagagcaagaaagtgggtaaagcaaggaaaggctgctggtaaatggtcagatgtaggcatttactatgtccaacttatcaacccagcagacgaagaaacacaacctgttatagccggagtagatccaggtaaatcgtatgcaggaatcggtgtacaatctggcaaattcacccttgctagatttcatctaatcctaccttttgggcgagtaaaacaacgaatggatcaacgaaggatgcttcggcgttcaagacgctctagaaggattaaccgcaaggttgcctttaatctcagaaaccatcgacaggttcggttcaataaccgcaagcaatccaaggttccaccatcaattaaagcgtctcgccaactagaactaagagttgttaaggaactatccaagatatttccgttaacagctattggctacgagcgagtcagagctgacgtagatagaaccaaacgaaaaacagccaagtcgggtaaaagcttctctcctgtaatgaatggtcaactttgggctatttcccaaatggagactattgcacctgtctttgttcgtgaaggttggcaaaaaaatgggaatggaacgtctcaaatcaggcagcatttaggactgattaaggacaaagaaaacaaaggtgaagccaaacctgaaactcatgctgttgatgctgtggctctagcctgcggttactttgttcaatacagccgccaccttacctcaaatacccaaggatacctctggaaagatgaagtccaagtcacggattcagtattcagaattatcacccgttctggtgctgtcaaacgaggtaaagaatatggattctttcggcgtcaactgcatttcgaggttcccgataaatttggaacaagaaaacgtaaagggggcacggttacaccctttagatttcgagtgggtgacttggttaaagccaataaagcccaagaaacatttgttggttacattggtggatttacttctaccaataaatctcaaaatgtttctatctacgactacacctggaagcga

SEQ ID NO: 1394 - DNA, 233 bp, Unknown
  Ga0376086_0019836 JGI
ttcactgaccccgccttacttcgttgaaggcggggattgagggagataacccctcatgaaacagtgaatagtggcatgagttagtacgagataaacacctccgaacacttccctaattcggaaaaactgtaagattctggaatctcagaaagtggggtaatgcccagcaacaatcgtgctaatgccgtaagggacttttaaacttcacactcctaggattatctccatgattc

SEQ ID NO: 1395 - DNA, 2241 bp, Chloroflexi bacterium
  MISC_FEATURE (1034)..(1049): Any "N" represents any nucleotide
atgtcacaggtctttgtcctagacacgaccaagcgagcgctcaacccggtgcatccggggcgtgcccgcttgctcttgaagcagggccaagcggcggtgtatcgccgctatccgttcacgatcatcctgaagcgtgcggtcgagcaaccttctcttgaagcgcttcgagtcaaagtcgacccagggagccaaaccaccggactggcagtggtcaacgatgccagtggcgaagtcgtgtgggccgctgaactgaggcaccggggcaagcaaatcaagcgcgacctgcagagccgccgcgccctcagaaggagtcgcaggcaacgcaagaccaggtaccgccagccacgcttcgacaaccggcgcaaaaagcaaggcacgctgccgccatcgttagagagccgagtctgcaacgtggtcacctgggtgcggcgtctgcggcggctgtgtccgatcgcggccatcagtcaagaacttgtccggttcgatacgcaagcgctagagaacccagctatcgagggtgtcgaataccagcaaggccagctttcaggctatgaggtcagggagtatctcctgctcaagtggaaccatcggtgcgcctactgtgacgcaagctcagtgcccttggaactcgatcacgtgcatcctagagccaagcacggctccaaccgggtgagtaatctcgtggcggcctgcacgccttgtaatcggcgcaagggcaaccaggagattggcgtcttcctcgccgatgatcctgagcgactggcgcgcatcctggctcaggtcaagacgccgctcatggatgcggcggcggtcagtgcgacgcgctgggcattacacgaccgactcgtgcggctagggctgcccgtggaatgcggcagtggcgggaggacgaagtacaaccgcgtgaggcgagggctgcccaagtcccattggctcgatgcggcgtgcgtgggggtcagcacgccggagcatctggacgtgcatggcgtggtgcccctgcacatcagggcaacagggcatggctcgcggcagannnnnnnnnnnnnnnnggctccttcaatctcacgacagagcacaggaccgtccaagggatcagccatcgcttttgtacgctcatcgcgcgtagcgatgggtatagctaccaacaaggaaaggagcgggtgcttcctcccgtcgcctgaaggcagacaggtctccgcacccaggtttttgatgaaagccatacgcctggtcgaggttcatcgtcccctacagatgcaagaaatcccagtgcccacgatcggcgatgacgatgtgctggtgcgcgttcgggctgccggcatttgtcacaccgacgtccactatcgagcgggaaaatcgcctgtgcgaccattgcccaggacgctggggcacgaggtcgcgggtgtggttgaacaggtgggcaagcaggtaacatctgtcaaggtgggcgaccgcgtctgcgtgcattacgtcttgagctgcggcaactgcttctattgcagtgccggcaacgaacaattctgcgtgcggggctctatggtggggcgttatgccgatggcggctatgccgaatacgtcgccgtgccggaacgtaatgccctgcacctacccggcgaaatcccctttgaacatggcgctatcctgatgtgttcgtcgtccaccgctttccacgccctgcgcaagtcgagactcaagagtggcgagaccgttgccatctttggcgtgggcggactaggcatatcggcagttcagcttgcgtatgcctttggcgcgctcgatgtctacgctgtagatatcaacgcagacaagctagggctggccgaaaaatacggagcgattccggtgaatggcaggtcgaacgatgcggttgccgagatacgcaggctcaccaaaggcaaaggggtggacgttgcgctcgagatgatcggacttccacagacgatgatgcaagccgtgcaatcgttggcggtcatgggccgcgcggtcgtggcgggtatcagcgataagccgcttgagatcgatacctaccgggaactggttgccagggaagccgaagtcattggcacgagcgaccatctgcttcacgagttgccactcctgctcgaactgacccggcggggaaagctcgacctttcagaagccgttacaagaactgtgcccttggatgccggtgcgatcaaccaggtgctggataatctcgaacacttccgcggagatgttcgcaccgtgattgtgccatga

SEQ ID NO: 1396 - DNA, 303 bp, Chloroflexi bacterium
gtcagagacccgtcccgtcgaacgggacgggcttgcgtggtgagacgcaggcccccctctgaccagtctcagccaccggtctcgcttcggcgaggctgacggggctccgttggaagcgaatgcataggaacgtccgggtgcttcaccagcccggaccgcttcggggcagcattaagcaagctgacgggtaaagccagtgtgctgtccaccggaaaccgcttcgcaacgttgacgaggtgagcattacctgggcaaccagaggcccatgcgggcacatcacataaggagtcctgtatgtcacag

SEQ ID NO: 1397 - DNA, 1038 bp, Unknown
  Ga0370494_000001 JGI
ttgtttgtatttgtcgttaatcaattaaatcaaccaatcatgccaacaacacccagtcgcgccaaacgctggattcgtgacggcaaagccacaccattctggaagcgtggcttcttttgcattcgattaaatttcgatccatctgataaagagtcagaacttgtcgccgtaggtatcgatcctggcagcaagaaggaaggtatcaccgtcaaatctcaagcccatacctatctcaacctacaagcagatgccgtcacttgggtcaaagatgccgtctcaactcgcagagatatgcgcaaagcacgcagatttcgcaaaacaccttgcaggaaaaatcgcatgaatcgcaaacgtggtggtcttccgccttcgaccaaagcccgctggcaatggaaattgcggatcattcgtcatctggtaaaaatcatccccattgccgagtttgtggtggaagacatcaaagccaaaactaaaggacagcgcaaatgggatgtatctttctcacctttacaagtcggcaaacaatggttctatgaccaattagaacaaattggctttgttcatttgttggaaggctggcaaaccaagaacttgcgcgatagttcagggctatccaagactaaaaacaaaatggctgaggtatttgaggcgcattgtgttgatagttgggtgttggcgaattggttggtcggcggtcacatcaaaccggataatactgcgatgatgtatttgacgccattacgatttcatcggcgtcaattgcatgttttgcagccgatgagtggtggaattcgtaaatcctatggcagtacgcaaagtcatcaatttgaacgcggtagtttgattaagcatatcaaatttggaatttgttatattggtggttatatgaaggatagaattagtttacatcatgttaagatcgggacacgtttgacacaaaccgccaaaccagttgagtgcaagtttttaacttataacacatggcgaggcttcctccccgccctgaaggacggggtctccgcctcgcaaaaaagatga

SEQ ID NO: 1398 - DNA, 255 bp, Unknown
  Ga0370494_000001 JGI
gtcaattaccccgccctgaagggcggggcttgttcgaataatgttcaccacatcttgaaggacaagattaaaagcaatcgactagccgaatatgtggtaagacccacatgacgaactgaattgactacccatggtagggtgaaatacgtgttagatgtcattctagtccgacacctctatgtcagtcagtggcgaagaatagtatatacctcgaaagaggacttatcgtaactttataaagaactcattttgttt

SEQ ID NO: 1399 - DNA, 444 bp, Gammaproteobacteria bacterium
atggccgttttggtattggacaaaagaacaaagccgctgatgccctgtgcggagaaacgggcacggttgctattggagcggggccgggctgtggttcacaggatgcgtccgtttacgatccggctcaaagatcgtacgctggaggaatcgaacctgcaaccgctccagataaagatcgatcccggcagcaagaccaccggggtcacggtgatccgcgccgacgacgctgatccagagcagcagcaggtcgtgatgctgatcgacatcgaacatcgcggccaatcgatcgatgcggcctgtgtcggacccgtcacggcgatcacccactggaacgtgcccaccctgaccgttcgggccacggggcggggcagttatcagcgcacccggctcaaccggtttggcttcccgcgtggctacctgatgcggcaaaaacaagtgaagggc

SEQ ID NO: 1400 - DNA, 290 bp, Gammaproteobacteria bacterium
gtcaactacccccgcctaaaggcgggagcttgtgaaagcaagctgggttgaccagggagagcggccaatacgccgctacgttggcaacaggtcgtcaagacccaccagcgaatgctgcctcagttcgctgctctggaagacggggatcatgcaggcgaaaggtaaagcgccgaaggttcccgtcgccgcgcaagcgggagccggttgccgaccttcccgaggggagccggggcgcaagccccgcgtcactggatctgtaagggtggtatgtttggagcattgagatggcc

SEQ ID NO: 1401 - DNA, 1335 bp, Trichococcus palustris
atggtattcgtgttaagcaaacaaaaacaaccaatggacaactgtacgcctgcaaaagcacggatacttcttcgtgacggctcggcaaccatacataagcagtacccctttaccatccggttgaaggacaatgcggcgcacaccgccgacaaaacgtatcagattaagttggacccgggcgccaaaataacaggcgttgccttagtagacagtgaagcccatgcggttttctttgccgaactggaacaccgcggagagcgcatcgttgctttattgcagacgcggtaccgtaaacccaagtggggaaatagctttaaaaagaaggattctaaattcaacgcggatacccgcagaccggagggatggctaccgccgtccgttgtgtcgattgagcaggatatcgtacatttcgtcaagaaaatgcgaaatctctgcatgattcagttggcggcggtggaatccgtcaaattcgacatgcagaagatggagaatgcttccattacggacgtggtctaccagcaaggcacgttgatgggttacgaaatccgccattacctgttggaaaagaaaggccatgcctgtcaatattgcggtggcctctcccaagacaaacatctggaagtggagcatatgcatcccaagtcccgcggcggttccgaccgcctgagcaacttgaatgtagcctgtcatacgtgcaatcaggataaggacaatcgcacgctggccgaatacgtggagcggctaaaaagctccaaaaccaaactcgaccagacgcgcattaaacggatagagcaaatcctaaggacaaacaaaacgttcatcggtctgcgctatgcggcttgggccaacagcatgcgacaccatttggtggctgacttagaaaagttgttgccacacataagccaaggcaccggcggacagacgcaatacaaccgcacgaccggcatggggttgccgaaagaacactattatgacgctttatgcgttggcagaatcccttccagcggctatcgtttggtaacagacaaggttttgtgcatcaagtcctatggacgaggcagccggttccgcggccggacgaacagttgcggcatcatcaccaagcaactgacacgccaaaagcagtttttcagctttcagacgggcgacgtcgtccgagcaaccgtgccaaacggcaagaagaaaggcattcacctcggacgagtggctgttcgcaaaagcggttatttcaacatccaaagcaccggattagttgtgcaaggggttagttacaaacattgccgcatcatccaaaggaatgacggatacggctatactttaaaacaaaggagttga

SEQ ID NO: 1402 - DNA, 312 bp, Trichococcus palustris
gtcaactacccacgactgaagtcgtaggcttgtaaaagccttagttgagcagactcagtttccgctttgcgggagctacgttaaattagccatcatggtctcttgtgcttctccagcaggaacagtcatggtcagcagtctaaacagtccgaagggttagggccgtgctgctgatgtaaaaaacttttttaactttgtcgaggagagagaggccgaacggcctccgttacctgtctgccagcttcattcgacagatagagatagttttatttttgattgtaaaataaatgcaaaaaggagctgaacgaaatg

SEQ ID NO: 1403 - DNA, 855 bp, Unknown
  Ga0209167_10018693 JGI
atgtcggtccttgttctggataggcacaagcggccactcatgccgtgttcggagaaacgagcacggctgctgctcgtccgtaaacgcgccgtggtccatcgctttgtcccttttaccatccggctgaaagagcgcacggtccaggagagcctggggcagccaatcgtgctcaagattgagccaggctcccgaaccaccgggatggcactggcccgcattgagcagactgaggagggcgaagtgcatcacgcgctgagtctttccgaactcacccaccgcggcgaagcagtccatcacgcccttttgcaacgagcaggctatcggcgacggaggagatccgccaacttgcgctacaggccagcccgcttcgccaatcgtaaacgccagagcggctggcttcccccttcccttttgagcagggtcgggaacgtgcttagctggacgcgacgctatcgccgatgggttcacttgatgcggatcgaggtggagcgcgtgaagttcgatctgacgctccttcaaaacccagaggtcgcgggcgtcgagtatcaaagaggcgaactgttcgggtgggagatcaggagctatctgctggagaaattccagcatcggtgcgtctactgcgggcgcgcaaacaccgcctttgaactggaccatatccggcctcgttcgcgcggcggatccaatcgtgtctcgaatcttgcgctcagttgccaccactgcaacaccatcaaaggggatcggacagccagcgaattcggccacccggaagtggaagcccgggccaggaagccacttcaagacgccgctgcggtcaatgcgactcgtttcgccctggtcgaggcgctgcgtctcctc

SEQ ID NO: 1404 - DNA, 325 bp, Unknown
  Ga0209167_10018693 JGI
gtcaacgaccccacacgtaaacgtgggggcatgctcccgcagtttacgcggtcctcgttgtccagcctgagttcctgatcctagaggcagggagctgagggaactacgttggtcaggtcatggcacctctggatgccacctcagtccagagcactgccgctggtcgttaaaaggccttcggggtaggggtcggtgcggccagccgaacaagcctgtggccaacattggcgagaggggttgcccgggcaagccgacccaggcgcgtcactagcccagtaatggggcctcatcacgaggcaaaacggaaaggagtgcttccatgtcg

SEQ ID NO: 1405 - DNA, 1413 bp, Unknown
  Ga0222637_1000159 JGI
atgcagaagttagaaaagagaaatacatatacacctacgggtgctccacaagcccgtagcaactgtgaccctgtaattaaacagagctgtggggtaggctcggtgttgcggggtttaaaaaccttttctaacggctccgatgtggaccaacttcagcatacaggagggcttaaagctaatgtgtatgtatatgtaataaaccatgatggtttaccgttgatgccatgcaagcctgccaaagctcgtcacttattgagagacgggaaagcattggtagtgaaaagaaaaccttttattatcatgttgttgtgggattgtgaagattatagacaaccggttgtattaggcttagaccctggttatcgatatactggattttctgcgaggtcaggtaagaaagaattgatttcggggacagttgtggggagaaccgatatccctaaaaagatggagcaaagacgaaattatcgtagaactcgaaggggtaaattatggtatcgggaaccgagatttgataacagaacaaaggaaaagggttggttggctccttcgattcggcacaaacttgattcgtttgtaagattggtttggggtatatcaaatattttaccgataacgaagataatagttgaggtagcaagtttcgatatacagaagataaagaatcctggtatcagtgtcaagggatatcagcgtggggtgttgaaaggattttggaatattcgagaatacgttttgcatagagacaatcatttatgccagaagtgtaagggaaagtccaaagataaaatactccaggtacatcatgtacacggtaaaaaggaaggtgctactgatagacctgaggagttgttaactgtttgcaaaacatgtcataaaaaccatcataaaggaatagatttgattcctgataaagagataaagagatttaaagctgaaacatttatgacgatggttagatggaagtttgtgaataaattgatagatatatttggtgacattgtttctcatacttatgggtatatcacgaagtccaatagaattggattgggattggaaaaaagtcatgtgagcgatgcactgtcaattagcatgggtagaagttataaaggaataccattaccgatattttataatggaccgcaattattcgacaggtgtaaatcttttgatgtgaaacaggtcaggagaaataatcgttcgatacagattaatcgaacgggattcaggccctcgatacggagagagcgatatccgttccagcctcatgacctggttagatataacggtaaggaacatcgagtgaaaggcagtcattgttatggagcgagattggtattagataataagaaatcagtggatgtgaaccgagtggagttgataacttatggtaaaggattatgttacgcttaa

SEQ ID NO: 1406 - DNA, 249 bp, Unknown
  Ga0222637_1000159 JGI
gtcagatacccaccgctaaagcgggttggcttagcctactgtctgattaggaggcattaaacatgcagaagttagaaaagagaaatacatatacacctacgggtgctccacaagcccgtagcaactgtgaccctgtaattaaacagagctgtggggtaggctcggtgttgcggggtttaaaaaccttttctaacggctccgatgtggaccaacttcagcatacaggagggcttaaagctaatgtgtatg

SEQ ID NO: 1407 - DNA, 1035 bp, Unknown
  Ga0070698_100047374 JGI
atgtcgcacatctttgtccctgtggtcgatcaggaacacaccccgctgatgcccaccaggccatcgcgggcacggcgctggatcaagagcggcaaggcgacccacttctggaaagggggggtgttctgcgtgcgcctcaacaggcagccatccgcgcgcgagcagcaacctatcgcggtgggcatcgatcctggttccaaacgcgagggcctcgtggtggccggagcttcccacacctatctgaatatccaggctgaggccagagacggcgtcaaggaagcggagagggacagcacgcgcatgcgccgcacccgtagagggcgcaagaccccttaccgcaagccgcgccagaaccgcaagcagagcaagaagaagctgccgccctccaccagggcacgttggcactggaaactgcgcctggcagcctggctctgccagctcttcccggtgagcgtcttcgtggtcgaggacatcaaagccatgacccgtggcaaaaagcgctgggatcagtccttttccccgttagaagtgggcaagcactggttctatgcggaactctcgaagttggctcctgtccagatcaaacagggctaccagaccagggaactgcgcgagcggttgggactgaagaagacgcacaagaagttggcagaggtgtgggaagcgcactgtgtcgatgcctggatactggcccacagcgcagtaggagggcggaagtccccagacaatcggcggttggtctgcgtcgcgccactgaattggcaccatcgccaactccatcgcttcgagccagagaagagaggcaagcgcaagccctacgggggcacacgctcgctggggatcaagcgtggcaccctggtcaagcacccgaagtggggcaaaacctatgtaggtggcacgatggacgggaaactgagcctgcacgacccacaaacgggcaagcggctcacccaatcggccaacgtcgccgattgtcggctgatcaagctgttacggtggaagacgcggctggtgcctctcttccccactaaataa

SEQ ID NO: 1408 - DNA, 243 bp, Unknown
  Ga0070698_100047374 JGI
gtcaagcacccatccccttgaaggggatgggcttatgaagggatccggcttgtcaccggggaaccaacgagggcaactgcgagactagcttgcccaagctctcgcaagagggcgtttgaaggagactgaacgatctgggcgtgacagcccaccggatggtgtgagcgcctccctaacttgcacccgctccgatcgtcagtagcgaagggaccatagcacacccgaaaggggcttatcgcacat

SEQ ID NO: 1409 - DNA, 936 bp, Unknown
  Ga0070739_10029292 JGI
gtgctcacgctcctacctgcacgtgcgcggccagcgtgctgctctagaacttctggcttaaacagaggtaaggggttaactcagtgctcagaagatacgccgcctgagaaccttgtcgaggccaactttaccctggcaacaggaggctctgaaaggagcaaaccaagcatgtcgaacgtctttgtcgttgatgccaataggacaccgctagacccggtgcatccaggctacgcacgcctcttgctcacccaaaggaaggcagcggtgctgcgccgcttcccgttcacacttattctcaaagccgtggtggagcaaccacaggcagagcggctgcgcgtcaaactcgatccaggaagcaagaccacggggctggcgatcgtgaacgagaccacgggggaagtcgtcttcgccgcagagctctgccatcggggagcggcgagcaccaagaccctcgctgagcggcgtagggtacggcacagtcgaaggagtcgccatacgcgctacagaaagccgcgcttcgccaatcgcaagcgaaggcccggctggctgcccccgtctctggagagtcgagtatgcaacgtggtgacctgggtcaagcgattgctgcgcatctgtcccatctccagcatttcccaggagctcgtccggttcgatatgcaggcgctccaacagccagaaatcagcggcattgagtaccaacaagggacgaaggtcaaggggtttcagaccggggatatggtgcgtgccgtggtgaggacggggaccaaagtcgggacctataccggccgggtggctatccgcactcgtggctccttcaatattgccacagcatgtgggacggtcaaagatatcagtcatcgtttttgcagggtcttgcatcactgtgatgggtatagctatcagaaaggagagcgggcaatgcctcccgccccctag

SEQ ID NO: 1410 - DNA, 270 bp, Unknown
  Ga0070739_10029292 JGI
gtcaggaacccctcccgtagaacgggataggcttgtataatcaagtctggacctgaccagactcagcctggcaacgggctacgttctcagggagtgctcacgctcctacctgcacgtgcgcggccagcgtgctgctctagaacttctggcttaaacagaggtaaggggttaactcagtgctcagaagatacgccgcctgagaaccttgtcgaggccaactttaccctggcaacaggaggctctgaaaggagcaaaccaagcatgtcgaac

SEQ ID NO: 1411 - DNA, 909 bp, Sutterellaceae bacterium Marseille-P2968
gtgcttcagacaacaaaccccttccaacattggcgaaggatcaccaccgaccgcaaggtcgagcagacggagcccgtgaggtatccgtcaatggagaacactttgaaagtttttgtgttgaatatgcgcgggcaaccgctcatgccgtgctccccgcccaaggcgcgtaagctgcttcgggccgggaaggccgtgcctgtgcgccgaacgcccttcgtgattcaactgacggtgccgatgggcgaaaccaagcagccgatcaccttgggtgtggatgcgggctacaagcacgtcggcatgagtgcaacgaccgccaaggaagagttgttggcttccgaggtcgaactgcggcaggacgtgacgggcttgctctcgaatcgcttggcacttcgccgcgcccgacgcaaccgcaagacccgctgccgtgcgccgcgttttgataatcgcgttcgatcaaagcacaagggttggcttgcgccgtccgtggagaaccgcattcaggcgcacatatcgcgcatcgtcgagggcttgccgaagacgcattgcgcggacgctttctgcattgctggcgtcctcgacgcaaaacgtcggggcgagtacctgtttcagaaacagacgcgccgccacaatcgccagatccacaagctgacgactctcaaaggccgtgtgcgcaagcgccatcaggctccgtacctagtgcacggcttcaggctctttgacaaggtgctgtgcaaaggggaagtcggctttatttttggcagacgctcctcgggtgcattcgatgtgcgccgtctggacagtacaaagatttctgccggtatttcctacaagaaactttcgcttcttgagaagcgaaagatgtttttaactgaactgagaaaggagggccgcgattcctcccgcgtctga

SEQ ID NO: 1412 - DNA, 301 bp, Sutterellaceae bacterium Marseille-P2968
gtctactacccctgactgaagtcagaggcttggcaacaagtcttggttgactagcctcagtccgttttcggacggactccgttggttgggaatccgttccgtcgcaagacgggacgcaaacaggcaccgcgggatgtcgatcctagtcccgcgctctgcggtctgcggttaaaagctctgagaggtaggagcggtgcttcagacaacaaaccccttccaacattggcgaaggatcaccaccgaccgcaaggtcgagcagacggagcccgtgaggtatccgtcaatggagaacactttgaaa

SEQ ID NO: 1413 - DNA, 1233 bp, Fermentation metagenome
atgcctacaactcaaagaaaagcaagactattgttaaaacaaggaaaagctaaaatacactcatatagtccttttaccatccaactattaacggcaacagggcaaacaaaacaagacataactctaggtatagatactggctctaaaactataggaatttcagcaagtaccaaaaaagtagaattatattctgctgaattggaattaagaactaatatagtcgaattattatcaactaaaaagcaatatcgaaggagtaggcgaaataggaagacaagatatagaaaagtaagattttttaatagggcaaaatcaaaacataaaggatggttaactccgtctattgaaaataaaattcagggccattttagaattgtagaaaaagttaatcaacttctaccaataaatgaaaccatagtagaggtagcaagctttgatatacaaaaaataaacaacccagctatacaaggaaaagaatatcaggaaggaaatcaattaggtttctggaatgttagagaatatgtgttatttagagatggttataaatgtcaaggtaagaaaaattgtaagggcaagatactaaacgtacatcacatagagtcaagaaaaacaggcggtaatgcacccaataatttgataactctttgtgaagattgccataaagattaccattcaggaaagctaaaaaaggcctttaagcgagggaaaagcttcaaggattcgacattcatggggataatgcgttggactttttacaatagattgaaagaaatatatcctaatgtaaaaatgacatatggatatataactaaaaatacaagaataataaataaactggaaaaggcacatagaatagatgcaagatgtataagcggaaatccattggctgaagaatcacatgtttggtatcgtattaaacaagttagaaagaagaaaagaagccttcatgaagcagttgctaggaaaggcaaaaaaatgccaaatagagaatctaaaagaaatagcaaaaacactaaggaaataatatacaaaggaaagaagtggtgcctgtatgatgaagttagactaaatggagatatcgggtttatatcaggatttagtggcaacatggtatatatacaagatatatatgggaaatatattcaaatatctccaaaatataagcaaataagcacaaacaacatagaattaataaaaagaaacaacaattatatatgtagaggtatcgcctaa

SEQ ID NO: 1414 - DNA, 246 bp, Fermentation metagenome
gtcaactaaccccctcttgcagaagaggagacttataggagcaattttatgaagtcttagttgtctagcttaagtgttcgttcactacgttggattgcatgcagaaacctgcaaatgatactctagtttgtagctctttcgtggctctgtaaaagttctgagggcaaggaacggtcaaccacattgtgaaggctttccaacattggcgaagggtaaataactctgaaaggagaacgtaacttgaga

SEQ ID NO: 1415 - DNA, 1311 bp, Unknown
  Ga0373625_0031164 JGI
atgttagtatacattctcgataaaaacaataaaccacttatgccttgctgtcctagaatagccaagttgttattgaaggcaggcaaagctgaggtggtacagagaacgccgtttactattaaactggtatttggtagtagcgggtataaacaggatataacgctaggcgttgatgctggctctaaaacgattggattatctgctattgatcaaactccgtttgaatacggatcaaaaacaacggacaagaaagaactattttcggcagaagtgcaactcagaactgatatagtagatttattatctactcggagacagaatcgtagaacaagacgaagccataagacaaggtatcgtaaggtaagatttctaaatcgcagaatagataaaggttggttagcacctagtataaggcacaaaatagatactcatttgactatggttgacaagatacataagatattaccgataacaaatatcatagttgaggtagcacagttcgatatacagaagataaagaatccggatatatcaggtatagaatatcaacaaggtgcgcaactagattttttcaatgtaagagagtacgtcttatatcgtgacgatcataagtgccaactatgcaatggcaaaagtaaagaccagatattaaacgttcatcatatagaaagcagaaagataggtggtaacgctccaaataatctgattactttgtgtgaaacgtgccataaaaagcatcacgatggtaatataatattaaaggtaaaaaggggtcagttgttcaaagacgcttcttttatgggtattatgcggtgggctttttacaatacactgaaagataaatatcctaatattagtttgacttatgggtatctaactaaaaacacaaggataactaacaagctaccgaagaatcatagaacagacgctttatgtatcacaggtaatccaacagttaaaggtcttgatacatggtatttctataaaaaggttagatgtcaaaatagacaaatacacaagacaactattaataaaggtgggtcaagaaagttaaaccaactgccttttatcgtatttgatatacgattatttgataaggtaaaatacaacaatcaagagtgttttgtttttggtaggcgtttaagtggtagttttgatatacggttacttgacggaacaacggtcaacgcaggtattagctataaaaaggtaaaagtgttagagcaacgtaaaacagttttaatcgaaaggagaaggcaattcctccccatgcctgaaggcagggggtatccttgccgaaacgagagatga

SEQ ID NO: 1416 - DNA, 248 bp, Unknown
  Ga0373625_0031164 JGI
gtcaataaccccacgcataaatgcgggggcttgtaaaagcctttgttgactagcctaagtagtgatcgggtaacccgatcttctactacgttgttttggtcataacacctgcgaatattcagtctagtttgtagctctgttgtctaatattaaaaactctgagaggtaggggcggtgtgttaggcgtgacaagccattacaacattggcgaagactgctaaccctgaaagggggtatactttatgtta

SEQ ID NO: 1417 - DNA, 2019 bp, Unknown
  Ga0114939_10003065 JGI
atgcagacgttagaagaaagaaatacatacacacagatagatgctccacaagtccgtcgcatctgtgatcaagtattaaacaaagatttaagtggccaggaaactggttgcggtcttagtgtacttgatttaaaaacttcttctaactctccgaagtggacctactcagaaatgagagaacagaactcgagagtctctgttaaatctaaaactatgagatcactttatcagctaaagctgaaaagtgttaggtctactaaagacaaaaaatcagacccaattcaagatttcaacaaatatacacaaggaatgaccttcgctcaaaaaattgaatatcttaacatgtctgatgcagaaagaggaaaaatcatagaaaaggtattaattcaagaaagaaaggagaaaaagcagaaagaaaaagagcaagcaaaagatagaaaaccaaaagaacctacaaagtataagaaacaaaaagtctatgtattcgtattgaatatgagaggacaacctctgatgcctacatcaccaagaaaggcaagacttctattgaaaaataagaaagctaaggtagtcaaaagatgtccatatacgatacagttaaattatccgaccggagaaaacaaacaacctattaagttaggaatcgattcaggatatgaacatgtaggtttatctgcgacaacagataaaaaagaattattttctgcagatgtcacattaaggactgatattcctgataagatgactgaaaaggctatgtatcgaaaaggaagaagaaataggaatactaggtatagagaaccgagatggttgaatagagggattccagaaggatggttggccccatcaatccaacataaattggacagtcatgttagattaatagataatataaaacagatattacctatcaataataatgatataactattgaagtggctacatttgatacacagaagatgaacaatccggagataagtggaatagaataccaacagggaactcttcagggatatgaagttagagaatatctattagaaaaatggggcagaaagtgtgcatactgtaaagtagagaatgtaccatttgagattgaacatatcattcccccttcgagatttggattatgtggaaataatagaatatccaatctaacgatagcttgtcatgattgtaatcaaaagaaatgtaatatgacagcagcagaatttggtcatccagaagtacaagtattggcacagaaatctctaaaagatgcggcattcatgaatattgttagatggagattagtcaattcaattcctgaatgtcatcatacatatggatatgttactaaatataatagaattagattaggacttgaaaagtctcatattaatgatgcattcgtaatcgccaatagaaacaatcaacttaatcaagaaagatgtaaatcgttcgaggtaaaacagattagacgcaacaatagatcattacaattaaatagaaaaggcttcgaaccatcaataagaaagaaaagatataaatattctcctggagatctagtcctattcaaagataataatacagaggctcacgtctgcgttgtaaaaggagttttcaattatggtgaatggataagattagtaaatcctattcctggagagaaagacattagcacaaatattaagaatgtaagaatagtcaaatatggaaaaggatttcggttctcatatccagatttttcgattaatcctgatattgttaatgttaagacaaaggaaatagaaaagactattattgaggacattgagaaacatgagacgacgatacaatatgacgtatttggagaagaagttataagacaatcaaagaaaatagaaaagaaacaagttatcaaaaatatcaaaactcaatatgatctgtttggaaagatcattaaacagaacaaatcaaagaaaataactaagaaaaagacggagactgttgaatcaattgattcgacaacacaggtaggaattgataatgcatggaattga

SEQ ID NO: 1418 - DNA, 281 bp, Unknown
  Ga0114939_10003065 JGI
gtcaactaccgccccctgaagggggtggcttgcacagtaatgagcaaggttaaaaagagttgattaggaggcatttaaaatatgcagacgttagaagaaagaaatacatacacacagatagatgctccacaagtccgtcgcatctgtgatcaagtattaaacaaagatttaagtggccaggaaactggttgcggtcttagtgtacttgatttaaaaacttcttctaactctccgaagtggacctactcagaaatgagagaacagaactcgagagtctctgt

SEQ ID NO: 1419 - DNA, 1197 bp, uncultured Erysipelotrichaceae bacterium
atgctgaaaaacggcaaggctaaaattatcggccatgacccgtttaccattcagcttcagtatgagtcggaaacaaacacgcaacctgtagaactcacagaagatacaggctatcagaacatcggactttcaattaagtccgaaaaacacgaatttgtaagccgggagtataaactgcttccggacgaaaagaacaggcatcaggcacagaagcgtattcgtaccgcaagacgtaaccggaagcgttaccgcaaacctatgtcaaagcgggcgaaatgttcccgcaggaaacagaaagactggctcgcgcctggtctcagaaacaaagcggatcgacacgttgatcttgtgaaacggtttatgaaactgttccccataacatccgttgtgctggaaatgggacagttcgataatgcagtgctttccgctgtaaatcagggattgccggtcccggaagggcttgcttatcaacatggacctaaatacggattcgacacgttgagagaagcggtatttgcccgcgatcattatcgctgcgtatgctgtggacgctctgcgatgaaagaccatgtgacgcttgtgattcatcacagaggttatcgcaaaggtgacagatcaaaccgtctttcaaaccttgcgactgtatgtgcagagcaccatacctcagcggaacacaagaaaggcggtaaactctggaatcttccaaaagacggagggtctctggcgccatccgcattcatgaatgcggtcaaatggtacatctgggactgtgtaagcaggcttgggatggagacaaagattacatatggcgctgttacaaaacgggaacgtctggacaggaacattatcaagtcacatgccaatgatgcgtattgtattggcgtatttcatccaaaacatcgtactcatacggagtattacagcaaacgcagaaggaatgatcgctgcttgcaaaagttctatgatgcgaagtataaagatgcacgtacgggtgcgatcaaaaaggcgtctgaacttggatgtaatcgcacgaagagaaatatgccgcgcaataacgaacgcaatctgcgtcccagtcgcggcgaaaaagtaaagtctggatacaacagtattcgtaaagaaaggcattcactgcaggcaggcgatattgttcagtacaagggacgcaggtatgaagtgaagacggtacgatttaaa

SEQ ID NO: 1420 - DNA, 286 bp, uncultured Erysipelotrichaceae bacterium
acatctaccgtgataactggtcctttcataggaacctcccttcatgcataaatcctggcaagacttccccgcaccctgtatcagaccatttttctggattacatacggcatcgcgatgtgttgcctgtgcgtgctcatttcgataaaacggaatgcgatacaagagggaagcagaacgtttttaatgactgactcgcggcattgccgggtctaaaaagtaacacgtccttactttacccaggccagtctgactgtatgcctacagcagaaaggtcagaaactgctg

SEQ ID NO: 1421 - DNA, 1470 bp, Unknown
  Ga0307376_10002158 JGI
atggtttatgtactcgacaagcgcaagaaacccttaatgccctgttccgagaagcgggcccggctgctcctggagcgcggtcgggcggtggtccacaagctggcgccgttcacgatccggctcagggaccgcctggttgaggacagtgttttgcaacccctcgatctgaagctggatcccgggtcgaaggtaaccgggggcgcggtggtccgggacggcaaggaaaccatcggctgctgtgagtgctctcaccggacggatatcaaggcgaacctagacgcccggcgcagccagcgtcgttcccgtcggaaccggaagactcggtatcggaagccgcggttcgataaccgacatccggagaagtgcgcggcctgcggcgggaacgccaaacacgggagccggtactgccggccctgcggcgagacccggaacttcgttaacaacggccatcgggaggcctggctgccgccgtcgctccgggcccgggtggaggaaactatgtcctgggtggcaaagatgcgcaagctcctgcccattaccggggtcgcgatggagctggtccggttcgacacccaatggatggagaacccgaagatctccggggtggagtatcagcagggtagtctggccggctacgaggtccgagagtatctcctgcagaagttcggccacctatgtgcttactgtcggggtgcctccggagacccggttctgaatgtagaacatgtggtcccaaggaacccggaccacgggccgaagggtacggaccggatcagcaacctggtcatcgcatgcaagacgtgcaacgaagccaagggcaacctgcagccggaagaatggctggaagagttgcgggcgtccgggaaggctctggaccggatccgggcggagaacctgccgaagacgctccaacagttgaagcagcctctgaaggatgcggcgatgatgaacgccaccaggtgggcgctgtatcaccgtcttaaagcgctcggccttcccctggaaacaggcagcggcggtctgacgaagttcaaccggacccaggttatgaagctacccaagacccacttctatgacgccgtttgcgtagggaaaagcctcccggaaacggtggatgtgccgttcgtcgaggtctacacggcaaccgggcggggtaaccggcagatggccgggatcgacaagtacggttttccgtaccggtggcgggagcggaagaaggcccaccttggcttccagaccggagacctggtggccgtcgacatcccgaagggcaaatacaaaggcaagtggcgcggccgggtggccgtcagaaagaccgggtactttgatatcaaggacggcactgggaaacgcaattgccaggggatccgggcggagtattgccggctattacaaaaggccaatggctggcagtacgaaaaggtttccttgcgggctgacgcccgtgccgcgcttcctccccatggataa

SEQ ID NO: 1422 - DNA, 400 bp, Unknown
  Ga0307376_10002158 JGI
gtcatagaccccacggctaaagccggggcttgaggaggccctcctccgacagtctctggatttaggcgagaaagcccgcaagggcgctatgaccagcccaagtctgccgggatccccgagcgagcagactacgttattccggttagggcaccctgggatgcttctccagtcccaggagctgccgccggcggttaaacagcgagcaggggtggatgtaacaatgcacgcagcacattcgtggtaatccccgtactttatgcgagcagtgccgtcggcgcaaagccgggataacatcggcgaggagagatgacccacctgcggtgggtgccccggtgccgaacccggcgcggaaccggtcccgtaagggatctccgcaaggagagaaagggatgaaatcatg

SEQ ID NO: 1423 - DNA, 663 bp, Synechococcales cyanobacterium S06
atgagcaattatgtttttgttttagatgccaacaaaacacctttacaacccactcaccctagtgtagctcgaaagctattaaaacaaaggaaagcatcggtttttagacgttatccatttacaattattctcaaggaagtaaaactcaatgttgttagtcaacctatagaattaaaactcgaccctggttcaaaaactacaggagttgctttagtttctaataatcaagtaatttggggagcagaattaaaacatcgtggtcatttcagttatcagttatcagttatcagttatcagttattaactattaattatctgttcactggtaactgttcactggtaactgaaagaggtgaattacaaggttatgaaattcgagaatatttattagaaaaatggggtagaaattgcgtttattgtggtaaaaaagatgttcctttagaaattgaacatattaaacccaaatcccttggaggtagtaatcgcatttctaatttaacccttgcttgtaaaggttgtaatcagaaaaaaggtagtcaattaattgatcactttttaagtgatcaaccacaattactacaacaaattaaaacacaagcaaaacaaccattaaaagacgctactgcggttaatacaactcgttggcaactgtttaattcttga

SEQ ID NO: 1424 - DNA, 240 bp, Synechococcales cyanobacterium S06
taaaaaagtagggatcaccaagaaacggagtaattcgtaatcaattggtgtgaaccagaccccccaaaaaaggggagcagttatcgctcgtcaagacaccttaaagttttgccagctttaagctctgtcgtcactgattaaacagtccgcaaggatagtgtctttgacctaacaagcttcgataacatggttgaggccaactttaccctattttaggagttcttagaaatgagcaattat

SEQ ID NO: 1425 - DNA, 1470 bp, Marine metagenome
gtgggggcgcaatgccgggtcgtaacattctcgaggagagcgcgggcctggcccgccgtcacagggccccgtaaggggaattatcaccgccctcccgagggcagaaaggaacccgccatgtgcgtcttcgtactggacaaacggaaaaatccgttaatgccatgttcgcagcggcgcgcccggctcctgctggagcggggtcgtgcggttgtgcaccgacaccatcccttcacgatccgtcttaaagatcgtgtcggcggaaaaacccagccggtcgaaatccgggttgatccaggctcaaaaggaaccgggctcgcagtcgttcggatcgcagaagatacctgcccggaaacgggagaggtcacgacaattgttcatgtgctcgagcgtatcgaactccggcaccgtggggctgcgatccgcaaagcgcttcttcagcggtcgcagcgtcgtcgtcgccgccggagcaaaaatcttcgctaccgcgcgccccggtttaacaaccgccgccgcccgaagggctggctccctccatcccttcagcatcgggtagacacaaccgcatcctgggtccggcgcctatcgcgtatggctccggtcctgcgtgcccgggtcgagacggtacggttcgacacccaggcacttgagacgccggagatctccgggatcgagtaccagcagggaactctcgccggctacgaggttcgggaatacctgctcgaaaaatggggccggtgctgcgcctactgtgacgcgaccggtgttccgcttcagatcgatcatatccatccacgcgcccgaggcggatcgaaccgggtctcgaacctgaccctcgcttgcggcccttgcaatcagacgaaaggatcgacccctgtcgaggcgttcctcgctcacgcgccaaagcggctggcacgtattctcgcgcaagcacggcggccactgcaggacgcagctgcggtgaacgcaacccgctttgccgtctgcagcgcgatctcagatcagacaggtctccctatcacccggttcagcgggggccagacgaaatggaaccggacgcgggcggggctggcaaagacgcatgccaatgacgcagtctgtgttggcccgacggatcaggtcgtaggggcggcagggccgaccctcctcgtcacctgcaccggccgcggaacccgtcagagaataatgccaaatgcgcatggtttcgcacgcggccatcgcccccgcaccaagtctgtacaggggttccggaccggagatctcgtgcgtgcagagatcccgtccggcgtgaatgccggggtctggactggccggatcgcggtacggagcactggttggttccttctgacagcgaccggacagggtgcggacggagagcgcggtcaccgcaagatcggcggcgttgcagcgcgttattgcgccctcgttgcatcaggggatgggtatggctacgcgcgggaggtgcaaccgtga

SEQ ID NO: 1426 - DNA, 309 bp, Marine metagenome
gtcaacttctcccccttgaaagagggagcttatgccgaaaggaggaaagctcacggttgaccagagttagcggcgtctgacgccgctccgttacgatcaggttcaagaccgacgtcggggtgcttctccagctccgacctctcgaagcccccgcagcagacacgcgtagggagacgtccgaaacgggtgggggcgcaatgccgggtcgtaacattctcgaggagagcgcgggcctggcccgccgtcacagggccccgtaaggggaattatcaccgccctcccgagggcagaaaggaacccgccatgtgc

SEQ ID NO: 1427 - DNA, 777 bp, uncultured Lachnospiraceae bacterium
atgctgacatatgtattggctgcagacggctcaccgctgatgccgacatataacatcagtaaggtgagacgcatgctcaaagacggcagagccgtcattgcgggccacaagccgggatttaccatccggctgacctacgctctgccggatcagaaaacgccgcatacgcagaagattgaactctgcgaagataccggctatcagcatatcggagtttctgtaaagagcaaaaagcatgagtatgttcatctgcaagtcgatacgttggcagatgagaaaaaccatcacgatgcgcagagacggtaccgtcgcaacagacgaaaccgtctccggtatcgtgcaccaagatttgacaaccgcacacattccaagaagcccggatggattgccccatcacttcaacataaggcggatattcatgtgcgtcttgtatccacgttccaaaaggtactgccgatttgtgacgtataccttgaagtggggacattcgatacacaggtacttgaggcaaaggaaaagggtcttccaattccggaaggatcagactatcagcatggaacccgttacggtattgcaacactacgtgaagcggtcttttatcgtgatggatacaaatgccagtgctgcggcaagggaatcaaagatggccggattctgcgtgtacaccacatcggttactggaaaacaccgtctgaccacacagaccggatgggcaacctgatcacggtatgcacgaaatgccatacagcggcaaaccacaaaaaaggcgggaagtga

SEQ ID NO: 1428 - DNA, 405 bp, uncultured Lachnospiraceae bacterium
ggcaacacagccccattggcgtaacgtgaggactgcagcactatcgcaatcctgagtgagtagccagggcctgtccaaaaacctttggattgcggataggctacgttatcagcaaattcggcagatcagtttcggcttgtctgttcgtgaacacaggcaccagtgtatgctccacaagtccactgctctgcggtgtgccattaaacatctctgagggaaaggagaagtgtggtacacaacaaactgctgacacacattggcgaaggggacccgctgaacggggcttctaggagcctccagtaggcagaaccccatgtatgccttccttgaggagacacagcatgggaagccgtaaggcacgtaacaatggttgaattttgaaaggaggcatcagttatgctgaca

SEQ ID NO: 1429 - DNA, 1227 bp, Unknown
  Ga0233412_10000063 JGI
atgttagtatacgttaaaaactgtaaagatgaacctttgatgccttgttctccgcgtattgctagaagaatgttaaaaagtggtaaagctaaaattgttagtcgtactccttttactattaaattgttatttggtagtagttcttataaacaggaggttgtagctggtatggatactggttctaaatttattgggtgtgcagtagtttcaaatgaaaaggttttgtatcagtcagaggtacaactaagacaagacgtttctaaaaagatgaaacaaagatttatgtatcgcaggactagaagatgcagaaagcttagatatcgtaaaatgagatggcagaacagagcttctttaagaagaaaagggagactagcaccaagcattagaagtaaaattaattctcatcttagagaaaagaagtttgttgaatctattttacctataacaaaatggatagtagaattagcttcttttgatattcataaaataactgatcctaacgtaaaaggaactgattatcagttaggcagtcagaaggatttttacaatgtaaaagcttatgttttatatagagataattatatttgtcaacattgtaaaggaaaatcaaaagataaaaagcttactgttcatcatgttatatttaggagtcgaggcggcacagattctcctaataatttaataactttgtgtgaaacgtgtcatgaacaattacatgatggaaaatttaaattagaaggaaaacgttctaaaaccaaacatgctacagaaataggtatagttaagtcacaattaaaaaagaagtggatagcctttgaagagactttcggtttcgaaactaaatatactagagaaaaaatgttaggtttacctaaaagtcatgctaatgatgcagtggctatttgttgtaaaaatagtagaattgaattgaataatgataatgtttatttgaaaagacatgtttcgtcaggcgattatcaacaaaccaaaggtaaacgcagcgaaactaggattcctacaggcaagttatttggattaagaaaatttgatcgaatcaaaacgactaaaggcgttggtttcgtaaaaggaaaaagatcttctggacactttgccttgtttactctagataaaaaaaagttcattccatcagttagtgtaaaaacaaattgtagtaaaatttcagctagaaaaactactttgatggaaagaattgcaaataatgaatag

SEQ ID NO: 1430 - DNA, 294 bp, Unknown
  Ga0233412_10000063 JGI
gttagtcgcattccttcttaattgaagagtctcgtaagagattaggctaaccagaccattaacaggagaaaaataaaagttgttaataaacgataagaaagaaattagaaacgttggaatgccgtcccagttccaacctctttggttgcagattaaacagttctgtgaggcaggaacagtgtttgtaacgttaaaccttttattatccggtcgagggaaagtcgaattctataattactccaaaattatagatacgcactactctgtttacggtcagaggtatattttatgtta

SEQ ID NO: 1431 - DNA, 1323 bp, Gammaproteobacteria bacterium
atgcaacgagttttagttttgagtagtaagaagcaaccgcttatgccttgccatccggcaagggcgcgggagctactcaaagaaaagaaagcggctgtctttcgccggttcccgttcacgataatcctgaaagagcgggaaggtggggaactacaaaggaccgagttgaagttagaccccgggagcaagacaacggggatggctctgactgttcacggggataacggcatccgccttgtttgggctggcaacctatctcatcgcggccatgcgattagcgaaagcttgtcatcgagagcagcccagcgcagagcgaggcgcaaccgaaagactcgctatcgcccggcgcgattcgacaatagagcgaagcccaaaggctggcttgctcccagcttgatgagccgggttcacaactgcgagacatgggcttatcggctaatccgactctgcccggtaactgacattgccattgagaccgttcgctttgatatgcaactcatggctaacccgaagattgccggtgtcgagtatcagcaaggcagcttgcatggctatgaactccgtgagtatttgttgcagcgggacgggcacacttgccgatattgcggcggcgcttccggtgaccctgttctgaacatcgaccatgtgcaacccagagctaaaggcggcagcgatagcgctaagaacctagtcacctcatgccgaacctgcaatgaggataaaggggccacactgctatccgattggttgaaagctgtcagcaagtcacgctccaaactcaacaaggcaagggcaaccagaataccaaaggtcatagctggccggagcccttcaatgcgagatgcggcggcagttaatgctacccggtatcggattggcgatgtgatgaaggcgaccggcctacccactactttctggagtggcggacgaaccaagttcaatcggtcgcagcaaggttatcaaaaagaccactggttggatgctgcttgcgtgggtgagactggccagcaagtgtttatcccttctagtgctgtgccgctggcaattaaagcaaccggtcacggctcccggcaaatgacgctgcctgataagtacggtttcccaagaaccaaagcgaaaggttgcagtcgggttaaagggttcaggactggggatgtagttaaagctgtcgtgcctgttggtaagtatgcaggcaaatacctaggccgaatctccgtgagaaaaacaggtacgtttagcctgcaagattcagcagggaaaagagatgtgagtcataggtattgcacgaaggttcactcgtgcgatgggtattcgtatgcctga

SEQ ID NO: 1432 - DNA, 255 bp, Gammaproteobacteria bacterium
gtcaactacccggccctaaaggaccgggcttgtaaaagcccatgttgaccagactaagccttaactggctacgttaggaaagaatccataggcaccgtgggatgaccttcgcaagtcccacgctctgcgggtaacagctaaacaggtgtaagaggttaagccagtgctgttgccatcaaacctttccataacattgtcgatgcgatttttaccggggaaacccgagactgcattagaggtaacacgatgcaacga

SEQ ID NO: 1433 - DNA, 2262 bp, Sutterellaceae bacterium Marseille-P2968
  MISC_FEATURE (1310)..(1310): Any "n" represents any nucleotide
gtgcttcagacaacaaaccccttccaacattggcgaaggatcaccaccgaccgcaaggtcgagcagacggagcccgcgaggtatccgtcaatggagaacactttgaaagtttttgtgttgaatatgcgcgggcaaccgctcatgccgtgctccccgcccaaggcgcgtaagctccttcgggccgggaaggccgtgcctgtgcgccgaacgccctttgtgattcaactgacggtgccgacgggcgaaaccaagcagccgatcaccttgggtgtggatgcgggctacaagcacgtcggcctgagcgcaacgaccgccaaggaagagttgttggcttccgaggtcgaactgcggcaggacgtgacgggcttgctctcggatcgcttggcacttcgccgcgcccgacgcaatcgcaagacccgctaccgcgcaccacgcttcgacaaccgcgttcgatcaaagcacaagggctggcttgcgccgtccgtggagaaccgcattcaggcgcacatatcgcgcattgaagcggtttgccgagtgcttccgatcaccaaaatcgtgattgaaaccgcatccttcgacattcagaagatcaagaatcccgaagtcgaaggcacggactatcagcagggcgagcagcttggcttttggaacgtgcgcgaatatgtgctgttccgcgacggtcacgtttgccaagcctgcaaaggcagatcgaaagatctgattctcaacgtgcatcacattgagagtcggaaaacgggaggcgacgcgccgggcaacctcatcacgctgtgcgaggcgtgccacaaggcgtatcacgcaggcaagttgaagcagttcagtccccggcgcggcgcttctttcagggcagagactttcatgggcatcatgcgttggacggtgctcaaccgcctgcgcgagcgccatcccgaattgcctgtcacgaatacctacgggtatctgaccaaacacaagcgcattgtcgagggcttgccgaagacgcattgcgcggacgctttctgcattgctggcgtcctcgacgcaaaacgtcggggcgaatacctgtttcagaaacagacgcgccgccacaatcgccagatccacaagctgacgattctcaaaggcggtgtgcgcaagcgccatcaggctccgtacctagtgcacggcttcaggctctttgacaaggtgctgtgcaaaggggaagtcggctttatttttggcagacgctcctcgggtgcattcgatgtgcgccgtctggacggtacaaagatttctgccggtatttcctacaagaaactttcgcttcttgaganccgctaccgcgcaccacgcttcgacaaccgcgttcgatcaaagcacaagggctggcttgcgccgtccgtggagaaccgcattcaggcgcacatatcgcgcattgaagcggtttgccgagtgcttccgatcaccaaaatcgtgattgaaaccgcatccttcgacattcagaagatcaagaatcccgaagtcgaaggcacggactatcagcagggcgagcagcttggcttttggaacgtgcgcgaatatgtgctgttccgcgacggtcacgtttgccaagcctgcaaaggcagatcgaaagatctgattctcaacgtgcatcacattgagagtcggaaaacgggaggcgacgcgccgggcaacctcatcacgctgtgcgaggcgtgccacaaggcgtatcacgcaggcaagttgaagcagttcagtccccggcgcggcgcttctttcagggcagagactttcatgggcatcatgcgttggacggtgctcaaccgcctgcgcgagcgccatcccgaattgcctgtcacgaatacctacgggtatctgaccaaacacaagcgcatcgtcgcgggcttgccgaagacgcattgcgcggacgctttctgcattgctggcgtcctcgacgcaaaacgtcggggcgaatacctgtttcagaaacagacgcgccgccacaatcgccagatccacaagctgacgattctcaaaggcggtgtgcgcaagcgccatcaggctccgtacctagtgcacggcttcaggctctttgacaaggtgctgtgcaaaggggaagtcggctttatttttggcagacgctcctcgggtgcattcgatgtgcgccgtctggacggtacaaagatttctgccggtatttcctacaagaaactttcgcttcttgagaagcgaaagatgtttttaactgaactgagaaaggagggccgcgattcctcccgcgtctga

SEQ ID NO: 1434 - DNA, 301 bp, Sutterellaceae bacterium Marseille-P2968
gtcaactacccctgactgaagtcagaggcttggcaacaagtcttggttgactagcctcagtccgttttcggacggactccgttggttgggaatccgttccgtcgcaagacgggacgcaaacaggcaccgcgggatgtcgatcctagtcccgcgctctgcggtctgcggttaaaagctctgagaggtaggagcagtgcttcagacaacaaaccccttccaacattggcgaaggatcaccaccgaccgcaaggtcgagcagacggagcccgcgaggtatccgtcaatggagaacactttgaaa

SEQ ID NO: 1435 - DNA, 1290 bp, Candidatus Acidulodesulfobacterium acidiphilum
atggtaaaagtaattagcaagaacggaaaacagcttatgccgaccaaaagatacggcaaggtaaggcgtatgctaaaagaaggcaaggcggtaataatatcgaaaaagccgtttactatccggttattgttcgatactcccgaaattgtccagcacgcaaccgtaggcgttgaccccggcgatactaccggatacgcagtagcgttggataacggtaaaatagtagaaaaaggcgaaatcaggttaagaaccgacgttaaatctttacttgcggcaagaaaagtattgagacgtagtagaagaaacagaaatacccgttaccgcaaggcaagatttttaaaccgctgcaataaaaaagcaggacggttaccgtcgagcatagaacaaaaagcaaggcatatagttaataaaattaacgaactcgtaagctattatcccgattatacgttaaaaatagaaattaataaattcgatatgcaaaaacttattaatcccgacatatccggcgttgaatatcagcagggctctttatacggctatgaaaacgccaagcagtttttactcgtaagagaaagcggcaaatgccagctttgtcataaaggttacaaagaaaatgacggctggcatattcaccatataataccgagagcggacggcgggactaataaacccgataatcttgcgttattacataaaagctgtcatataaaaggacataagacaggagctttatcaaaactcaaaaaagcaaagcagtttatatccgccgcaatgtataacgccgtaagatataaacttatggacgaatttaaggctatttatggagataaggttgcatttacctacggctatcttacttctataaacaggcgcagtcttgaattagaaaaagagcattataacgacgccatagctattacaggcataacggaagtaaaagataacgttattcttataactgttattaagcaggcaagaaaaaagaaacgttccctgcacgaagctacggcgaggaaaggcagaaaagagcctaacgtccattcggtcaggaacgctaaaaataccaaagaaattaccgtaaacggcaggaagtttgcattatgggataaagttaaggtatgcggtaaaaagggatatatttcgggatttaccggaaacgcctgctacgttcaggatattaacggtgactatataaaagcggacggcaaatcctataagcaggttgccgcagataaaatagagcatataaggaggaataacaattggataacggaaagaatactggcgtaa

SEQ ID NO: 1436 - DNA, 269 bp, Candidatus Acidulodesulfobacterium acidiphilum
gtcaatcaccccgccctttcggacggggtttgaaccgtaaggttcaagagtaattggttgtctaggctaagtatcggagacataaccgatactacgttatttgcgtgatgataccctgacgtaatgcccaagcgtcaagctctatcgaggctctgtaaacaaagaggaaactcttagtcaacctcatttaacaaagcgcttataacattgccgatgggcaataacttccaaaaggaagacttacagtaactttttagaggtaagaaatg

SEQ ID NO: 1437 - DNA, 1338 bp, Unknown
  Ga0209647_1000722 JGI
ttgagtaaagtttttgtcttagacacgaacaagcaacaactcaatccggtgcatcctgggagggcgagattactgctcactcagggcaaagctgccatattcaaacgctatcctttcacaatcattctcaaggttgccattgagcaaccagaggtacaccctctcagaatcaagatcgatccagggagcaaaaccactggcatagccatcgtaaacgacgcgacaggcgaagtcgttttcgcggcggaacttgcgcatcgagggcaagcgatcaagaaagcgttagacgagagacgtgctgtgagacggtcacgacgccagagaaaaacccgctatcgcaaggcgcgatggcagaacaggcgacggggaaagggttggcttgcgccctctttggagagcagaatagcccatgttctgacgtgggttcaacgcttacgccgtcttgctttcatcgtggcaatcagtcaagaactggtcaagtttgacttgcaagcgatggataatcctgaaatcagcggcgtcaagtatcagcaaggaacgctggctggctatgaggtcagggagtatctgcttgagaagtggaagcgcatgtgcgcctactgtggcaaaaagaatattcccttgcagatagagcacatccagccgcgcgcgaaagacgggacccatcgggtaagcaacctctgtttagcctgtgagcaatgcaatctcgccaaagggatacaggatatcagggtgtttctcgcgaagaagccagaggacttgaagcgcattcttgctcaggccaaagcaccgctcaaggatgcagcggcggtgaataccacgcgatgggcgctctccgagcgattgaaggagggcgggctgccagtcgaatatggaagcggtggcttgaccaaattcaatcggagcacgcgcaacctcccgaagatgcactggctcgatgcggccaatgtcgggaagagcacgccagagaagctccagattcgggggatcatgcccttgcgcatcacggccaatggccacggctgccgccagatgtgcttgatggatgagacaggctttccccgcaccaaacccaaacagaagcattttacgcatgggtttcgcactggcgatatcgtgcgcgccatcattcctgctcagctcaaccatgcaggggtgcatgtgggaagactgtccgccaaggccaaaggcgggtttaccatcgccaccgccaaaggcaaaattaccggtgtgggaaagaagtattgccgcgtgctccaacgagctgacggttacgggtacgcgcagcaatatgcgcctacgggcgtctttctttcctccctcagcctgaaggcatga

SEQ ID NO: 1438 - DNA, 271 bp, Unknown
  Ga0209647_1000722 JGI
gtcaggaacccaatcccccttttaggggatgggcttgtgtgaacaggctcacctgaccagactcagctcgcaagagctacgttacgggagaaattaggtacgttgcggtgcgaggccagccgcagcctctacggcaaacaattaaacagaggtacaagggttaactcagtgttgtttgcactaaaccttccagtaaccttgtcgaggccaccattacctacgcaagtagaggcttggcaacaagcaaaaaggaaccaagcatttgagtaaa

SEQ ID NO: 1439 - DNA, 813 bp, Chroococcidiopsis thermalis
atgcaaaattacgtttttgttgttgacacaaataaacagcctctcaacccaatttctccagcaagagctagagaattgttgactaaacaaaaagccgctgtatttagaatgtatccctttacaattattctgaaacacgctgttttaaaccctgcaccaaagccattaactattaagctagacccaggcagcaaagttacgggactggcgattttagaaggagaaaatgttatttgggttgccgaacttgagcatagaggaggaataatcaaaaacgctctctctgctaggcgttctttacgccgcagtcgcaggaatcgtaaaactcgctatcgtccagcacgttttgataacagaaaacgtaaagaaggatggctacctccatcattgatgcatcgggttttgactactgagacttgggttaaacggctttgccgctacgcaccaattgctcaagttgtcatggagttggttaaatttgacactcaaaaaatgcaaaatcccgaaatagatggtgttgaataccagcaaggggaattagtagggtatgaggtacgcgaatacttgctcgaaaaatggggacgcaaatgcgcttattgcgatacatcaggcgtgccactccaaattgagcatattcacccacgcgccaaaggcggcagtaatcgagtttcaaacttatgtttgagttgccaacggtgcaatatcaaaaaaggagtcaaattgattgaagaatttctgaaaaaggataactctagactagaaaaaatcaagcaactagccaggaagcctctaaaagatgcctttctctgttag

SEQ ID NO: 1440 - DNA, 243 bp, Chroococcidiopsis thermalis
gtcagcaacccccgacttgaagtcgggggcttcaggcagataacctgaagccctagttgaccagactatcgtttgaggcaagtgttaaagacctactttaggatgcttgctagtcctgaaccctagaaccagacgattaaacagacttattgggttaagtcagtgtcgtttggatagttaccgacctcaaacaatgtcgaagcaaacattacctgtaaaaaggatgcagcaatgcaaaattac

SEQ ID NO: 1441 - DNA, 1287 bp, Unknown
  Ga0310694_10002417 JGI
atggtctatgtactgaaccgatacggcaaacctctgatgcctaccacccggtacggcagggtccgccgtctgctcaggaaagggatcgcggtcgttgtcgattaccgtccatttataatccagctcacttatgacacgcctaacggcgtgcaggaggtcagtctaggcgtagacgcgggtacgaagcacgtaggcttctccgcgacgacaaagaagaaggtacttttcgaagcagaattattgctgaggtcggatatcgtggagaaactctccacacgaagggagttccgtcgggccagaaggaacaggaaaactcgctaccgtaagtcaagattcctgaacaggacccgctccaagaagccgggatggcttgcaccttcggtaaggcagaaggtggattcccatatccactggatttcaaagatatgcaagttcttgcctatcaagaagataacggtggaggccacgcaatttgatacccagctgttgaaggctcaggaacagggtcttccgttgccgcaggacaccgactaccagaagggtgagcagctcggattctggaatgtgcgtgagtacgttttattccgggatggtcacaaatgccagtgctgcaaggggaagtccaaggacagtaagctgcatgtccatcatatcgaaagtagaaagacaggcggcgatgcaccgaacaacctcatcaccctgtgctcggaatgtcatgccaagtaccatcggggagaaattgatctgtcgaagattgcaaggcgtggcacctcgctacgtgatgccacacagatgggtatcatgcggacggctctatttaaccggctgaagaaagaaatcggtgagggaattacttgcttcaagacttacggctacatcaccaagagtactcgtagtaaatatggactgccgaaggaacatgtcatagatgcgcggtgcatcagcggcaatccgtgtgcatgttcagatggcaagtacttgataatccgcaagttgcgtgcgaacaacaggcaactgcacagggcaactataaataagggtggaaagcggaggaacaaccaggcaccccgtgaagtaaggggtttccggctgatggattccgtcgagtatgcatacagggattgcttcctgagcgcacgtagagtgtcgggctccttttccgttgcggatatcaccggaaaagttctatcagattcggccagttacaagaaactgaccttaaaacatcacaacaacacttatattatggaggaagcagcgctcctctcacccactaaagatgggtga

SEQ ID NO: 1442 - DNA, 297 bp, Unknown
  Ga0310694_10002417 JGI
atcaactacccacgggctaaatacccgtgagtttggggtgacccggactcatagttgattagactcagtgaagcggagaaatccgctgaactacgttaggaaggtcatggcaccccgggatgtacggtcaagtcccccgctctgccgcttgtggttaaacagtcctgatgggtagggacagtgctgcaggcacgacaagccttcctaacattgtcgatgaccacccacagggagcaatccctgcattacctattaagttaggtcaaaaaacaacaaataacggataacgagcacatg

SEQ ID NO: 1443 - DNA, 1290 bp, Unknown
  Ga0070697_100040654 JGI
atgaaggtgtttgtgctatcaaaagaaggaaagtgcttgatgcccacgacgccacggcgtgcaagggtgtggttgaaggcaaaacgtgcccgtgtcgtgcgccacgaccctttcaccattcgattgcgctttgccacccagcaacatgtgcaaccggccaaggtgggcgttgataccggctccaaagacgtgggcatcgctgcactcgccaatggcaaggtggtcttccaggccgaggtccatctgcgtgatgacatcactaagaaaatgacccaacgacggacgtttcggcgcaatcggcgtgcgcgcaagacgcgctatcgtgaagcgcgctatgacaatcgacgccgacctgatgggtggttgcccccttcgctgcactccaaagcagaggcgaccgtcaaggccgtgcgcttcattacttcgtttttgtcggttggtcgggtcacagtcgaggttggccgttttgacacccaaaagaggcaaaacccagacatcgctcacctggaataccaacaaggcgaactgcaaggatacttcctgcgtgagtatgtcttagacaagtggcagaggaaatgcgcgtactgtgatgctcacggggtccccttggaaatcgagcatattgtccctacgtcaaggggaggaagcaatcgggccagcaatctcaccctggcctgccatgcctgcaaccggcgcaaagggcagcacacagcagcggagtttggcttcccagaggtgcaggcaaaggctcgtgtgccgttgaaggatgcagcgcatgtgtcttcactgaaaagcagggtggtccatgacctgcaagcagtcttcggagagagccaggtgagcatcacatatggttaccagaccaaatataaacgcatccaggtgcttgacctgcccaagtcccacacgaacgacgctatggcgattgcctgcgagatcggcgaggtggtcaagccattggagatggtccatcagatccgatgtctagcacggggccactatcagcgtttcaatggcctgcacagtgagcacaagtgttgggccccgcgcaaagtgcgcgggttcaagctctacgaactggtcaaggccaaaggaggggtgggctacatcgcgggacggcgggagaagggagcgttcgtcatcaaagacgtcatcagtgggaagaacctgttggaggtcacgccgcgcaaattggtacgagtagcgcgtcccacccaggggtggatgattacgcgacagccgatgctggagagcatcagaaaggaaggcggcgcttcctcccccaattga

SEQ ID NO: 1444 - DNA, 298 bp, Unknown
  Ga0070697_100040654 JGI
gtcaatgacctccccactctgtggggaggctcgtgaggggttcgccccttgcaagccggattgaccagacgacacctccgagccagtcgcgccgagaaaacgagcgtcgtggctggcgctgaagaggtgagcgatagtaccaagcgttgcagttcgcacccagggatgctgccccagttcctggctctgcaacttctgacttaaagaactgcggtccaggaacggtggtcagaggaaagtaccgggtgctatcaccgtcgaggggatcgtttttactccgaaaggagccttacctgat

SEQ ID NO: 1445 - DNA, 1254 bp, Bioreactor metagenome
gtggtcagtagcgaagtgggacgaactataagacggagggtaacctctactgtagtaactagtaatcaaggagcatcgatcatgtcagaacctcaacctaagtctaatccaactggacagacttacaaagtaccagctcaacactgtaaacatccaccagctaactacgtaccagttgtcagtagtacaggtaaacctctgatgccttgtcatcctcaacgtgcaagagaactgatggaaaaaggtaaagccaaaccaagatggcacttcggtagcatcttctacatccagcttactgaacgtgaagatggtgtaactgatcctaacgtagccttaggagtagatccaggatctaagttcgaaggctactctatccgatctactaaacgtaccttacttaaccttcagtcagttgcacctactcatgtaaaagatcgagtagctgatagacggaatatgcgacgatctagacgcttccgtaatactccatgtcgtaagaacagaagtagtcgtagtaacttaactagtcaaggtaggatacctccatcaactagagctagatgtgatgctaagatcaacatagttaagcatctacttaagttataccctatcgttacgatcgtaatcgaagacataaaagcttatactaagaagaacaaaagtgccgatggcggtcctagtaacaaactgtggaacaagaacttctcgcccatccagatcgggaagaagtacttatatactaaattacaagagttagtatctaagctcatacttgttgagggcttcgtaacttatcaactccgtagtctactacaaaccgtcaagaaagctaagcttaagggagctaagatcttcgaagctcactgtctagatgcgtgggtactagctggtatcggagtaggtcatgaagctattgaagaacctgataatatgagcatgtggtgtgtagaaccgatactactgcatcgtagacagttacatgttaccaagcccgctaaggatgggttcagaagatcttatggtggtactagaagcatgggctggaagcgtggtagtctagtacatcatcctaagtacggtcacacttacgtaggtggtactagtaataatcggatcagcttacatagtatccgagatggacaacgactagctcagaacgtctatccagaagagtgtaagttccgtaccttcaacgccatgaagatcaagttcatccagcgagttgagatggtctgcaagatctgtaaaactact

SEQ ID NO: 1446 - DNA, 224 bp, Bioreactor metagenome
gtcaagtacccctccctaaaggaaggggcttgtagtctaggctacaaggtacctaggtaactctaggtagaaaagactagcttaaccaagtaacctagcctagtaatagtgttctaggggacgactgaaggtaactgaaccacataacaactgatgtacgggtgctccactagctcgtaacctctcaggtggtcagtagcgaagtgggacgaactataagacgg

SEQ ID NO: 1447 - DNA, 1374 bp, Unknown
  Ga0209511_1005681 JGI
atggtatttgtattgtcaaaacaaaagaaacatttagacatgtgctctaatgctaaagcaagagtattgcttaaaaaaggttatgcagtagtgcataaggtatttccttttacaattagacttaaaaaagacgtgtcaataataaaaccaaaagaatataaaataaaaatagacccaggttctaaatatactggattatctattatagataataatgccaacgttgtttttcttgccaatatagagcatagaggagaaaaggttgtaagcaatcttataacaagacaacaatcacgtagaaatagacgccaaagagaaacccgttacagaagctgtaaatttataaatcgaaaactcaaaaaagatgctaagtatagggttgcaactaatagaccagaaggatggttgccaccatctgtaatatctatagaacaaaatataattaacttattaaagaagttaaaaaaggtttgtaatataacttcaagttcaatagaatatgttaaatttgacactcaactaatggaaaattctaaaatcaatggaatacaatatcaacaaggtactctttttggttatgaaataagagaatatctttatcataaatatggacatacatgtcaatattgtggtggggctacaaaagataatcatttagaagtggaacatatgatttcaaaaaaaaatagtgggtctaattcaattagaaatttaagtttagcatgtcatacttgcaataaagataaagactctttaaatttagaccaatggttaactaaccttaaatcattaaagactactaacttaaatgatacaagaataaaaagaattgaacatatattaagtaaaggtactatttatagaacaacaagatatagtgcatgggtaaatggttataaagaaaaattagtcaaagatactaaaaaactaattccagatatagaactaggtacaggagggcaaacaagtcataataggaatgtattaaaactatcaaaacaacactattatgatgcattgtgtgttggagctataccaagtagttttaaatttaagactactgatgtgttaactattaaagcgtatggaagaggttctcattttagaggaagaactaatagctgtggcattataatttcaaagttaccaagacaaaaacaattctatggctttcaaactggagatataattagtgcaaccgtaattaaaggtaaaaaaataggtagttattttggaagagtggctacaagaagtagtggatactttaacattcaaactaaagaagctacaatacaaggtataaaccataaaaattgtaaaatagtgcaacgaaatgatggatactcttataacatagaaaaaagggttatttaa

SEQ ID NO: 1448 - DNA, 307 bp, Unknown
  Ga0209511_1005681 JGI
ataaatatgtcaattacccacgactgaagtcgagggcatgttaggcgactaacatatctttaacctaagttaattgagcagatttaagttaccttagtcatcataacctattatgcttctccagtaatagtcgttatgggatacaatctaaacatggctttgtgggaacgtgtattccgaaaggaatacattctaaaaccaagtgatgtattcataaagctatggtaacagtatcgaggagagacagtcgaaaggctgcgttacgcccgtaagggtggtttcttacaatgtaggaggttttaatatg

SEQ ID NO: 1449 - DNA, 1182 bp, Unknown
  Ga0118733_100051634 JGI
ttgaaagtattagttttaaataatcatgaagaagcactaatgccttgctctgcgagaaaggcaagaattcttctcaagaataacaaagcaaaagtcgttagacgtttgccttttgttattcaattaaatgattattcttctactggatatctacagggtttaacactaggagttgactccggtcactctacaataggtttgtctgttacttcagaaacaaaagaatttattgctttagaactccaattaagaaatgatatatcaagtaagctagaaacaagaagtatgtatagaaggacaagaagaggtaggttaaggtatagaaaacctagatttaacaatagaactagaaaagaaggatggctacctccatcagttcaacataaagtggatagtcatgttaaaattattaagttatatcagagatacttaccaataagtaaattaataatagaaactggaagttttgatatggctaggattaataatcctagcatagagaatagtgattatcagaagggtaatcaatatggctttaacaacgttaaagcatatattctttcaagggataagtatacttgtcaatcaggtaagaagggctgttcaaaagagctccatgtacatcacttggtattcagatcaaaaggtggaagtgacaatcctaaaaacttaataacgttatgtaagaagcatcacagacaattacatgatggtaagttgaatattaactttaaaaagcataaagttttaaggtcagcaacggtgatgaatataataagagtttatatattaaaagagttaccaggagcgatagagacgtttggatatattactaaaagtattaggttggaaaacaatatagagaaaacgcatagtaatgatgcttttgtaatatctggaggggttaatcaagaaaggattgatgtaattgattataaattgagaagaaggaataaccgtagtttacaaaagaacagaaatggattttctaggagtattaggagagaaagatattattatcaaccacatgacgtagtggagtatgaaggaaagagatatgtagttacagggactatgaataaaggtaagagtatccaattaatgattgatggtaaaaagaagacaaagcctccagttaagttaacgagtatatataggtcaaggagtatggtattgtgttaa

SEQ ID NO: 1450 - DNA, 291 bp, Unknown
  Ga0118733_100051634 JGI
gtcaaccacccatgaatgaattcatgggcatgctccgtgaggagcatgatattaataatgggtgattagattaagcttgagaacatcaagctacgttgtttaagttataataccttagagtgcctccctagctctaagctctattgcttaatattaaaagagtttaacgactcggtgtgttaagtgtgaaaagcttttacaactttatcgaagggaatctactcctgtagaggagggtagtttagcaattaagctatagctatctttaaactaaaaggaaagaaattgaaa

SEQ ID NO: 1451 - DNA, 819 bp, Clostridioides difficile
ttggtgtttgtaattaataaaaacaaaaaaccattgactccttgtcactttgctgtagcaagaaaattacttaaacaaggaaaggctgttgttcataaacaatttcccttcactattagattaaaagaattaaaagaagctaatcctaaaggtttaattattaaattagacccaggagctaaacaaacaggcgtagcccttcacaaacctaatggtgaagttatacttcttgcaaccatagaacatagagcatttagaaggacaagaagaaatagaaaaacaaggtatagagcaccaagatttttgaatcgcaaacgacttgaaggatggttaccaccatcaattcaaagtatagtggataatatcaaaaattttataataaaacttaaaaagttatgctatataaagacaatctatatagaaacagtaaggtttgatactcaattaatgctaaatccttcaattgaaggagtagattatcaacaaggcactctcttagggtatgagattcgtgagtatctattatatacttatggccatacatgtcaatattgtaaaggactcacgaatgaccatcaattagaaattgagcataagtatcctaaatcaagaggaggttcaaattctattagaaatttaaccttagcttgtagaacttgtaaccaagaaaaaggaaataatacacttgatgaatggttacaatctctaagtaaatcaaagttagataaagaaagagtaaaaaatataaactcaatcttaaaaactaataaaccagtaaatctaaaagatattgccaaagtaaatagtagtagaaatgct

SEQ ID NO: 1452 - DNA, 279 bp, Clostridioides difficile
gtcaataacccacctctaaagaggtaggcttgaagttatctacaagtcatattgaccagattaagttttaaactacattattaaggtcataacacctacaaatgcttctccagtttgtagcctctgttgcatattattaaacagtttgtgggtacaaacagtgtaatatgctatcaagccttaataatattatcgaggagagcagtttctaactgcgttacctatgaagttaatttcttaacttcatagagtttactcttaaaggaggttttttatttg

SEQ ID NO: 1453 - DNA, 1380 bp, Unknown
  Ga0307994_1018066 JGI
ttggctgtatttgttttagataaacagaaaaatccacttatgccatgttctgagaaaagagcaagactgctcttatctagaaaaaaggcagttgtgcacttaatgtatccgtttaccattcgtttgaaagaacgagttggtggatgtttacagtctgtacatctaaagcttgatccaggtgctaaaacaactggagtggctgttttagtagagctacaagaaacgttcaaagtggcgatgtttgcgcacttagagcataacggttttgcaataagtgaaaaactaactcagcggagagcatttcgtcgcagacgtagaaatcagctttggtatcgtcaagctagatttgacaatagaaccaagccgaaaggctggcttgcgccatcgattcagcaccgagttgactcaacactttcatgggtaaaaaagatttctaacctttgccccgttagtgatattggatttgagcgtgttaagtttgacattcagaagatgcaaaatcctgaaatttcagggtttgattatcaacagggcactttatttgggcttgagttgaaagagtatttgctttacaaacataaccaccaatgcgcttattgctcaggtattagtaaagatccaatacttgaggttgaacacgttcaaccaaggtctaagggtggttcgaattcagtgaagaatttggtaattgcttgtagagcttgtaacgaggcaaaaggcgctttgcttttaacccagtggaaaaacaaattgagcagaagtgctttggccataactagaattaagggtattgaccgagttttatcaggtaaatggcgtggatttagagataccgcagctgtgaatgccaccagaaacgccttgttagctgatattttaaccttctccatcgaaataaaaaacaaagagcaaattagcgtctacacaggcacaggtgctatgacgaagcttaatcgaaagcttcaaggtttaccaaaagaccacgccatagatgcagcggttgtgggtgaaaacccaaaacacttgcagaactggcaagtacccgttctcagcatcaagagtacaggcagaggcgcttacaagcgcacaagacttgataaatttggttttcctcgcggttacttaatgcgtcagaaatcggtacaaggttttcaaacgggcgacatggtaaaagcattggttttaaagggcaaaaaacaaggtgaataccttggtcgtatcgctgttagagccagtggaagttttaatattcaatctaaagatgggttgatacaagggattagtcataagtgctgtacgttattgcaacgcaataatggttatggtttttgtttaacaaagatagctttaaccaacggagaagagagaaaagctgcctaa

SEQ ID NO: 1454 - DNA, 287 bp, Unknown
  Ga0307994_1018066 JGI
gtcaactaccccgccctaaaggacggagcttgtaaaagctttggttgaccagagggcttaactttagttaagcagaagatcgtaacaggtcgttaagacttaccttgggatgcttccttagtcccaagctctaaaaggtttaaagaatgcaggcataaggtaagtgccgaatctttaagtcgctgtagaaatacaggagccggttactgtcaatctcgaagggagatgttggtttctccaacacgttactagacccgtaagggtaattattggagttagttttggct

SEQ ID NO: 1455 - DNA, 1179 bp, Unknown
  Ga0114919_10027729 JGI
atgcccacaactcctagaaaagcacgcctactcttgaaaacaaataaagccaagatcaaaacacacaacccgttcaccattcaactaacaacagcaacaggagaaacaaaacaacccattgaactaggcactgacccaggtttcaaatttattgggtttagcgctacaacaaaaaaggaagaactaatcagcggtgtggttaagataagacaaaatatcaaaaaactaatggatccgcgtagaggtttcagaaaagcacgccgcaatcgcaaatggcatagaaaatctagatttaataaccgcaaaagaaaagcaggttggttaccaccaagtacacaacataaagttcaaacacataaaaacttaatcaagaaacttcagagtattcttccaatcaccaatatctatatagaaacaaacaagttcgacactcaaaaaatggagaacccagatatcaaaggtgtagaatatcaacatggaactttacaaggctacgaagtcaaggagtatttattagagaagtttgaaagaaaatgcgtctactgtaagaaatcaaacacacctttagaagtagaacatgtcataccgagatcaagaggaggtagtgatcgcatctcgaatctcactatatcatgtcatgattgcaatcaaaagaaaggcagtcaaacagctgaagaattcggatacccagacatccaaaaacaaacaaaaagatcattaaaagcagcgacacaaatgaatataatagtcaagaggctattggaagacccagatctgaacactatcccaatacctgcttatgaaaccaagtttaggagaaaacaactgaacttagagaaatcgcatgtcaacgatgcttttgtcatagcaggaggcacaacacaaacaagatcacaaccttatcagattaaacagacaagaagaaataatagaaaacttcaacaaaacagaaaaagatatggtatttcaattagaaaacaaagatatccaataagcgctaatgacttaattgagtatcgagtgagaggcgagagtaaatttagattgtttcgagttaaatcaacacaaggtttgagaggtttaattgttcgagataataagtttgatcaaaatcgttttccaaacgtttcaaaagttaaatttatctgttcaggtaaaggcctttgttttattggatga

SEQ ID NO: 1456 - DNA, 265 bp, Unknown
  Ga0114919_10027729 JGI
aaggaggtcagtcataaacctcagggtggttagagggcttgacaaaccactcagtctaagttgcaacacgcccgggcacaacttaactgaacagtcaagcagcagttggtcaggtcatgataccttgggatgctccaatagtcccctgccctatcgcctagtattaaaagtcccgttgggcaaggacggtgtactaggccaaaaaagcctccccaacaatctcgaagtggaccaactccaagacgaagaggagggtagaacttga

SEQ ID NO: 1457 - DNA, 1464 bp, Unknown
  Ga0256404_1000183 JGI
atgacatacgtatatgtgctgagcaggagcggcaggccgcttatgccgacagcaagatgcggccatgtgcgcatcctgctgaaggaaaagaaagccagggtcgtatgcggcaggccgttcacagtgcagcttctgtacgatacagacgaagcagagccatatctctacggaggaacagacccgggcaggacgaacatcggcaatgccgtcgtgacggaagacggcgagtgcgtttaccgcgacaaggtcgagacaagaaatgatgaagtggcgaaaggcgtgtccgacaggaagaagaatcgtcaggctcggcgcagaggtgaaaggctcgtaaggaagcgccgggcgaaaagatgcggcaccctgtcgacaaagctcggaagcggcagacttatcccggggacgaaaaagcctacgctcgtgaaggatatcatcaatcaggaggcgcggttccggaaccggaagaagaggcagctcataacaccgagtgttaaacagcttgtcgacacgcatctgaaccacgtcgatcagataagaaagatacttccggtcaaaggctggtgcctggaagctaaccgcttcgcgttcatgaagctggaggacggatcggtcagaggtatcgacttccagaacggcagactgaaaggctacgcctcggtcgatgatttcgtgtacgagcgtcagaaaggcaagtgcttctgctgcggagccccgatcgaacactaccatcatgtgaaggagcagaacgacaacggctttgacggaccggagaacaaggtgggtctgtgcaatagctgccacactaagatacatatcggtgagctcgagctcgatgtcgagggcttcggcaagaagtatcaggcgctgagcgtgctgaaccaggcaataccgtacatttatctgggccttgtcgaacgcttcgatgaagagaatgtcttcatctgcgccggatacgacacgaaggagatacgcgaagcagccggccttgacaaggaccacgatatcgatgctctgtgcatcgcgtcgatggcgacaggcgtgataccaaagcagcctgaggaacaggccttcagtgtgaagcagtacaggcgccacgacagagcgaagatcaacaatcagcctgaacgcacatacaagcttgacggcaagaccgttgcgaggaaccgaaagccgcgcatcgaccagaaaggcctcgcattgtcacagtggtacgaaaagcaggtcagactttgcggcaggaaagaagctgaccgcatgctgtcgaggctgaaggtaaggaagtcctacagacgctacaacaacctgtaccgcgtcatgccgggtgcgatcgttcgccatgacggcaggatcgaagttatggagagacagcagaacaacggctattacttcaaccttcgatgcgggagaataaaggcttcagaatgcgagatcctgcaccataacgcagggcttgtatatatttag

SEQ ID NO: 1458 - DNA, 223 bp, Unknown
  Ga0256404_1000183 JGI
gtcaactacccgccgcttaactcgctgacgcttcgttagaagcgggggcttgtaaggcgagagtagttgagcaagagcgtgatgtatctcacactgcgggattttcccagtcccgcacatactggtctgatgcaccaagctcagggaaacatcacccgcccatcgaggcggagactaacagttataactcaactagaaggaaaggaggacgcacatgacatac

SEQ ID NO: 1459 - DNA, 1140 bp, Unknown
  Ga0272443_10006725 JGI
atgccaacaacacaaggaaaagcaaggaagttgttaaaacaaaataaagcaaaagtatataaaagatacccttttactatacaattaaattatgctactggtgaagctaaacaaaatattacactcggtattgatactggatataacaacataggatttagtgctattacagaaaaagaagagatatattcaggaactttagaattagattcaaaaactacaaaaagacttacagggaaaagaatgtatagaaggacacgaagaaacagattgcgctatagaaaaccaagattcaataacagggtaaaaacaaaacataaaggctggttaccaccctcaataaaacgaaggtatgaaacacatatcaacttaataagaaaaataaagaatatattgccaataagtagactaatactggagatcgcaaagtttgacatccaaaagatagaaaatccaggaatagaaggttctggttatcaacaaggtaatatgtatggttatcagaacttaagaagttacttaatgtcacgtgaaaaagggaagtgccaattatgtggcaaagagtttagtaaaacagaccctgcacatatacaccatgttatttcaaggaatgatggtggtacaaataaacctaaaaatttggctttattgcataagagttgtcatcagagactacataaaaagaatctaaatcataagctaaaaaagaataaagaatataaaggttctacattcatgtcaataatacataagaagttttataaagatttaccaagtctggaagtaacttatggtaatataacatttgtaaatagaaatagtttaggtttagaaaaatcacatagtaatgatgcctttgtaatagcgggtggtaatatacagaaaagaataaatccaatagtaataaaacaaaaacatcgtaataacaggtctttaggtaaacagaggaaaggatttgccccatcaagtagaaaaaaaagatataagattcaaccaatggacttagtaaagatagctggtaaatggttaagaactaatggagtacattgtaaaggtaaaaggttaatggtaaataaaaaaagtataaatataaataaagtagagtcaatctatagtttcggaagttttatatttaactaa

SEQ ID NO: 1460 - DNA, 243 bp, Unknown
  Ga0272443_10006725 JGI
gtcaataaccctcgactaaagtcgagggcttgcttggtgacaagtgagggtaacttgttgattagactaagtaccttgtagggtactacgttctttaagttataatacctgtgggtactccactagcctgcagctctattacttggtattaaaagagttaaaagactcggtgtattaagtgtaaaaagcttttagaacattgtcgaagtggattaactctgaaaggaggacgaaacttgagag

SEQ ID NO: 1461 - DNA, 1083 bp, Unknown
  Ga0118725_1014359 JGI
atgagagttccagtagtatcaaaagatggtaaaccgctcatgcctaccaagccagccaaagcaagaaagatgatagaaggaggagtagctaaaaaatgctggtcaaaaactggcgtattctatatacaaatgttaatacctgtgggcaaacaagttcagtctgtggcactagcaatagacccaggcagcaaatacgatggctacgctgtgtctggtgagaaggatgtagcgctcaaggctatggcaataatgccacagaaggtacaaaagaaagtaactgagcgccgtcaattaagacgtagtagacgttatcgtaatacgagacataggaaggcacggtttgacaacagaaaacgcaaatctgggtggatagcaccatcgcaattggctaaagtacaattccgtatcaagatagtacgagatttagccaagatattccctctcaactatatcgcagtagaggatgtaagattcaatcattacaaaaagcgatggggtaagtatttctctacagtggagataggaaagacgatgttgtacgaagaactggaacgacatgttcaggtaataaagtacgccggttggcaaacagcagaagcacgtaagtattggggcattaagaagtcaaatgttaaggatgctttaacgcccgaatctcatgctaatgatgctcttgcgatgcttaatgagatgttcggaaataatgttgatgattcgtgcacttttcttgtttggcgtaggctggaattcgccagacgttcattacatcggcagaattataagaaaggtggtgtacgtctacgatttggcggaactaccaacggacattatatgcgtaaaggagatcttgtctctggtgagcaaaaagatagacaattcatcggttgggtctgtggcttacccacagacaagacaagggctattgctgtggctgatgcaacaggtaagcgtttagcacaatgtacagaacgaaaagtcggactaatgcgccggtttactggcgtaacatgggagagtcagtacataccaaagccaccaatagcacctatagcgcaggagccaacccaactacaatttttctaa

SEQ ID NO: 1462 - DNA, 277 bp, Unknown
  Ga0118725_1014359 JGI
tggttcgtcaataaccccctcctgattctccgaatcagaaggggcttgggggacacaggatctccgacgcaagtattgactagagggtcccgaaagttttcgggacagccgcactgcgatggtacatacgtcatggtgtttcgctagctctgacctctataaactgtctcttgtgggcagtggggataaagacctgacatctttcgcagttgcaatctcgaagcgacctttactttagtcccgaatatcgggactccgagaggagaaaatcatgaga

SEQ ID NO: 1463 - DNA, 1308 bp, Unknown
  Ga0335001_0013376 JGI
atgcctaggagaagttttatgactaaaaatgttgtgtttgtcttagacaacaccaagaaaccactaactccttgctcaccagcaagagctagaatgttgttacgggatggaaaagctgcagtttggcgaactgtcccgtttacaatcataatgcaaagtactataattgaaccaataatcaaaccgcttaaagtgaagatagaccccggttctaaaactactggcatagttctcgtgaatgaaaaaaatcgagttatatacgcagtcgaattagttcatcatggcgatatgataaaaagtgatttagaatcacggaagcataatcgaaaacttagaagatctcgtaaggtacgatatagaaaagctaggtggttaaatcgtggacgcaaaaaaggatggttaccaccatcaattttacatagggtgattacaaccgtaacgtgggttgataggtttatgaagtggtctgttattaatggcttatcagtagaacaaaataaatttgacacacagaagatggtcgattcgagtatatatggtgtaaaataccaacaaggaacgcttgctggatataacgtacgagagtatctacttgagaaatggaaaaggaaatgtgcatattgtgggacatctaacgtaccattacaggttgagcatgtacatccgaaatccaagggtggttcaaatcgcattagtaatttagttatggcgtgcgccaaatgtaatgatgctaaaaaatcattggatattgctgattttttgagaaacaaaccaaatacacttaaaactataatgtcacaattacagaaaccgttggtagatacagcggtaatgaattctacacggataaagttaataacggtattgggtgaatatggtttaccaattgaacttggtaatggtgcacaaacaaaatataatcgtgttaaactaggatatgtaaaagaacattggattgatgctgcgtgtgttggtgattctggtgagtcagttatcattcacccacaacaaaaaccgttacgcataatatctatgggttatggtaatagacagatgactcgtattaatagatttggttttccatgtgctagtgcaaaacgcggtaaagttgtattaggaataaaaactggcgatttggtttgtattaaccaaccaaaagggaaatacaccggaatatacacatcgagagtttctgcaattaggtataaagatgattatattgcaataacagtttccggtagaaaactatggtttccggctaaactagccagagttaaacaattagccgatggttatttgtatatgtaa

SEQ ID NO: 1464 - DNA, 311 bp, Unknown
  Ga0335001_0013376 JGI
gacaatgaattatatattttaaacgtgccggactttccagttgagcgaccagattaacaatagttagtattttatcaatgtagtttattgataaagctcaaccagcttacttgagaattcaagtagacgatacgaattgaagcgaaagcgacacaccatagggtgcttcaccagctctatgcaactgtggtcgaaatgtatgactgggacatctggttgttccataagcatgtgactgaacgacattcgtcttccgagcgaggtaaacattacaggctatgcctaggagaagttttatgactaaaaatgtt

SEQ ID NO: 1465 - DNA, 1341 bp, Unknown
  Ga0311301_10014764 JGI
atgtcacgtgtattggttgttgatgccaagcggcaaccgctgatgccctgcacgcctgctcgtgcccgtatcctactggcacagcgcaaggcagcggtcttgcgtcgctttcctttcactttaatcttgcgcgagacaaagccacaggccactgtggcaccgctgcgcctcaaaattgatccaggcgcgaaaacgactggcatggctgtcctgcatgctgagacgtctgaggtgctctgggcggcagagctcacgcatcgcggcgagcaggtgctcgccgagctgatgaggcgacggggcgtcagacgttctcgccgcgcccgacatacccgctacagagccgctcgcttccgcaatcgccgccgcgctcctggctggctgcccccctctctactttcacgtgtacacaatgtcgagacttgggtaatgcgtctgctccgcttttgtcccataagcgcgctctcctatgaactcgtgcgcttcgacacgcaactgctccaaaacccagatattgagaacctcgactaccagaaagggcctctcttcggcatcgaactgcggcactatctgcttgcaaagtgggagtaccagtgtgcgtactgtctgaccacaggggtcccgctcgaaatggaccatgtggagccgcgagctcggggaggcagcgatcgcgtggccaatgtggtgcctgcctgccacgcctgtaaccaggcgaaagcagacaaactcctggaagaattcctggcagaccgcccagaggttctggcacgagtgcaagccaaacgccaagcaccgctcaaggacgcagccgctgtgaataccacccgacttgccttgtatcgaaagttacaggcgacagggcttgcggtggagacgggaacaggttcgctgaccaaatggaaccggcaacagcagggggtgccaaaagcgcactgggtcgatgccgcatgttgcggcgtctcaactccggcgcacgtgcgactccagacggtgcgcccctggctgatcactgcgacaggccgacagaacaggcacatgcgcaatgttgacaaacacggtttccccgttggccgggccaaaggtccgagccgggtgcgcggctttcgcacgggagatatagtcaaagctgtctgtcctgcccatctgaaggcggcggggactcacgttgggcgtgtcttagtgcgcacacgtggaattttcgatgtgcaaacgaggcacggtcgggtcaaagatatccctgcacgctactgccagaggttccaagccggagatgggtatcgctatactcttggtgcggcgcttccccttactcccgaatgtggaggctcccgcgcggccgtttag

SEQ ID NO: 1466 - DNA, 306 bp, Unknown
  Ga0311301_10014764 JGI
gtcagcgaccccaccgctaaagcggagggcatgtgcagagcatgtcctgatgctgaccagccccctgtgcctgggcacaggagccgttagttggaagcggcccaagttcggactctcgaatggcctttccagttcgagaccctccaatcccgatgttaaacaggcagacggggaagcagagccagtgcatcgggaagatggccgccagctaactgggcgaggaaaacattacctgtttggtgcctcaaggaccaggcagcgctgcccctttacggggtctccacaaggagttgcatgatgtcacgt

SEQ ID NO: 1467 - DNA, 1302 bp, Human gut metagenome
atgaaacaaaaaaagtatgcatttgtagtagataaaactggaaaaagattatctcctacagatatcaataatgcatggagattaattcgcacaaaaaaagcaagatgcattaaatataatccaatgactattaagttaaataaaatcgtaaaagaagaagaaattgatccatctgtttttgaaattggaattgatgatggttcttctcatgttggattctcagtgattcaatattgtataaaaaataatcaaattacaagaataaaagttattcaaaaagcaaccatgattcaacggcaagatgtaaaacatcttatggatattagacgtagttatcagcataatcaccgttctgagaaaagaagcagagcatgtagatttaataatcgagtaacatctaaaagaaaaggacggattgtaccaaccattaaacaaaaaagagatgcagttgtaagagttgtaaaagcttatcaaaaacttgtcaatgtgacacaaattgcattagaagatgtaagcattgatattagagttttaactgaaggtgaaaaattagaaggaaaagattatcaaaaatcaaatagacaagatgacaatattcgtagagctgtttatcttcgagacaagggaatttgtcaaatgtgtggagaacataaacaaaaaatggaagttcatcacattcatcctcaaagattgggtggaccagatagtatttataatgaaattttattatgccatgactgtcatgcatctattaatggaaaagaattgcaatacaaagatactttttataaaaaaattaatggcaaattaatcagaactgattgtgcacaacatgttatgcaaggaaaatattatttaagaaaggaactttccttacttggagaattacatttaacatatggtggtacaacagcaaataaacgaaatgtttggaacattgaaaaatcacatagtaatgatgcaatctgtattggttgtaaagatattcatatgaaacctgatacggtgaatgtacaagaatatacaataaaaccaatcagacataaaaagaaatcaaatacaacatctatgggatttgagttgggtgattatgtggaacttgaaataagaagtaataaattaaaaaagaaaatcaaagtaaagggttacattactgcatttataaaatgtcagaatggaaaagataaaggaaaattaacttatataaatttaactgcagatgatggaactatttacaaaagatattctttaaaaaaatgtaaattactagaaaaacaaaaacatttacgttttatggaataa

SEQ ID NO: 1468 - DNA, 305 bp, Human gut metagenome
ttgctttcaagccttagtgagtgtagacttcggttagcacaatgaactacgttatgcccactgcttaaaactaacctttagattttctcagtctgaagctcttagagttatacatttgtataacatgtgcaacacatagcattggcaagaggaaaaacattaacttgttactttcattgagattacatcaatttgaaagaagatagaaatatcaatttttattatggattatgagtttcatttttcataatccataactatttattttttaagaaaggagatatcctatgaaacaaaaaaagtat

SEQ ID NO: 1469 - DNA, 816 bp, Human gut metagenome
atggtgtacgtacaagacataaatggtaaacctatgatgcccacaacaaggcatggaaaggttaggagactgcttaaagacaagaaggcagtcgttgtgaacctatgtccgtttaccatcaaattaatgtacgtaacatctgattacaaacaggaaattgtgttaggcgttgatgctggtactaaacatgttggtttatcggctacaacgaaaagcaaagaactttacagtagtgaagtaatccttagaaatgatattgtagatcttttgtctaccagaagggagctacgaagatcaagacgaaatagattgagatatagaaaacctcgttttgataatagaataaaaagtaagcgtccgggatgggtagcaccttcggtgaaatacaaagtagacgcccatattcgtgttattgacaatatatgttctatactaccaatatctcgtattgttattgaagtagctcaatttgatactcaaaagattaacaatcctgaaatatcaggtaaagaatatcaggaaggtgatcaacttggattttggaacgttagggaaagacataatcgtcagatccataaacaaaagattccaaaaggagggataaaaagaccaaatcaatctccttttgaagtttttggtttccgattgtttgatagggttatgtttgaaaacagttattattttatattcgcaaggcgtaaaaccggtagttttaatattcgagatattgatggtaaaaaccaaagagatattacatacaagaaattgaaattatcaaggtgtaaacgctttatggtacaaaaggaaatggattga

SEQ ID NO: 1470 - DNA, 269 bp, Human gut metagenome
ataaccaatttgtattgtattatgcataatagccaaaagctattccgattattagcctaagtgttgaaacaaacactacgttatttaagaatagatagttacctacggatgtttacccaagttcgtagctctaaggtaagtgattaaacagttctggtatttgaggaacagtgttgcttacgaaaactttaaataacattggcgatgggtactaacagagtttcactctgacttatgttgaataaacattaaaaacgtttgtagatatg

SEQ ID NO: 1471 - DNA, 1335 bp, Unknown
  Ga0394881_0018228 JGI
atgcaaaaagtattcgtattagacacaaacaaacaagccttagatatgtgccaccctggacaagctcgaaggttgttaaaagcaggattgggggcagtctatcgacgttttccattcacaataattctcaagagagaagttactgctcaagaactacaaaactatttcttaaaactagatccaggaagtaaaacaacaggagtggcaatagtaaatcaagaaacaggagaagtggtatttgcagcagaaatagaacatcgaggagaaactattaaagctagcttagatagtcgcaggggtgtaaggagggcaagacgctcaagaaaaactcgttatcgcaagccaagattcaataacagaaccaggaaaaaagggtggttacctccatcactactaagcagagtagcaaatgtagaaacttgggttaagcgacttatacacttatgtccaatagccggaattagcttagaactagtcaagtttgatactcagcttatgcaaaatgctgaaattgaaggtgtcgagtaccaacaagggcaattagctggatatgagttacgcgagtaccttttagagaagtataagcgaaaatgtgcctattgcgaaaaacaaaacttgcctttgcagatagaacacatagtgccaaaaagcagaggtggaagtaatagtgtaacaaacctaacattggcttgtgaaaagtgtaacctaaagaaaagcaacaaaacagctttggagtttggttatcctcaagtgcaagcacaaggtaaattgccattaaaagacgctgctagcgtaaatagtacaaggtgggaaattttcaatagactaaaagttacaggattgccaatagaaataggaagtgggggattaactaagtacaatcgcagtaggcaaaacctacctaaagcacattggatagatgctgcttgcgttggattaactactccccaaaaactagatgttgataaaattaacctattgcaaataaaagctacaggacatggaagcaggcaaatgtgcagtatggataagtttgggtttcctcgtacctcaaagaaagctggtaaaaagttttttggttttcaaacaggcgatattgcaagggctgttgtcacaaagggcaaaaaagttggtacttatattggtaaagttgccgttagggctactggctcttttgacatttttacctcttctggcagagtctcaggtattggctataagtattttactcttttgcattcttgcgatggctattcttgtttttacttaattcaaaacaagaccgcaattcctcccacgcctgaagtcgtgggcttccttgcgggtgatctgtga

SEQ ID NO: 1472 - DNA, 260 bp, Unknown
  Ga0394881_0018228 JGI
gtcacttacccacggctcaagccgtgggcttgttgggtagataactaacaagtccgagtgaccggactaagttctaagaactacgttattaggagagttaaagaagacaccttggaatacgtgccagttccaagcactgtaaccagtaagttaaacaattgcaagggtatagcgatagtgcttattggatgaactgattaataacattgttgaggcaaacattacttccgaaaggaaaggtttaacaaactatgcaaaaa

SEQ ID NO: 1473 - DNA, 459 bp, Unknown
  Ga0070717_10057385 JGI
ctgaacatccaggccgaagccagggatggggtcaaaaaagcggaggaacacagcacgcgacagcgccgaacgcgccgggggcgcaagaccccttgccgcaagccacggcagaatcggcagcagagcaagaagaaattgccgccctcgacgaaagcgcgagggcctcggaaactccggctggcacggttcctctgtcagctcttcccggtgcgtgtcttcgtggtcgaagacatcaaggcccgcacccagggaaaaaggcgctgggatcagcagttttcgccgttggaggtggggaaacactggttttatgcagaactcggcaagcttgcccccgtggtgaccaggcagggctatgacacatcaaccttgcgtgaccaattggggttcaaaaagatcagcaagaagctggccgaagtgtgggaggcgcattgcgttgatgcctgggtgctggcgtatagc

SEQ ID NO: 1474 - DNA, 240 bp, Unknown
  Ga0070717_10057385 JGI
gtcaagcacccccgcatagaatgcgggggcttgtgaagcgaaccgacttgccatcggggaaccagcgagggtaactgcgaaacgagcttatccaagctcgagcctcgggcgagtgatcggaagctgaacgatctgggcgtggcagcccacagcaacgagcgagacgcctccctaatctcgctccgcttgggtgggaagcctcgaagggaacagtttactcgaaagaggcttatcgcacat

SEQ ID NO: 1475 - DNA, 1452 bp, Unknown
  Ga0224423_10003602 JGI
atggaagccggacagggcatacacagcaatgtatatgttcttccgggagtctgtagagacagtaaacactcaatttcagaaaggaggcgtcagttaatgtacgcatttgttctcgcaaaagacggttcccggctgatgccgacaaacatcaggaaagccagaaagcttcttgataaagggaaagccgtcatttacaaacatcacccgttcacgattcagttaaccggtgaatccaggcactgtactcaatcgatcgagttctgtaaagatacaggatcagaacatatcggtgtgagtatcaaatcagaaacgcatgagtatgttcatgcacaatacgatcatctcagtgatgagaaacagagacatgaggcacaggcatcgtatcgaagaagcaggcgcggaagaaagcgttatcgcaagccccgcttcgacaacaggagaagaaacgataagtggttagctccaacagtagaacacaagaaggacaaccatatacgtatctttgatatgtatgcagaggtatgtccaatcacaagagcagtcttcgaagtcggacagtttgatccggctgctatgcaggcacttgaggagacaggagaagtgctccaggggactgattatcagcatggtaagaagtttcaacttgccaatctgagagaagctgtattcacaagagaccgctacacctgtcaggtgtgcggtaagtcagtgaaagacggagtaattcttcatgcgcatcacattatttaccgttctaatggcggaacagaccgtatcaacaacttgatgactgtctgtgacaagtgtcacactccgaagaatcataagccgggaggcaagctctatggtctcaaaccactgaccggtatatatagagacgtaacattcatgaatattgtcagatggtacatcaaaaatgatattcagaatcgttatccggatattactgtcgaacacacctatggttcatataccaaggcgtcacgccgtgatctcggtcagctgcctaagactcatgcgaatgatgcatatgcgatgggtgagttccacccaaagcacagatgcaaagaaacgcattatgtgaaacgtcgcaggaacaatcgtgttctctcgaagttctacgatgcggtgtatatcgacatgcgtgatggaactgttaagaagggttccgagattggatgtaaccgcacagatcgcaatattccccgcagcaacccaagcaacgagaggatgtatcgcgggcataaagtgtcaaagggaagagtatctgtcagaagacagagatacagcatccagcccggagatacggttcggtatagaggaagtattgcccatgccaaaggtgtgcactgtaacggtacaagggtgatgctggatacaggcaagtctgtaaagatcacagatgttgccgtaattaaaagaacaggaggatggcaattcctccccgcctga

SEQ ID NO: 1476 - DNA, 245 bp, Unknown
  Ga0224423_10003602 JGI
gtcaataaccccacctgattcaaagaatcagatggggcttgtgaaagaaaagcaattttcttacataagcccgattgactagcctaagtgcttcgagcactacgttatgcagtgacgcataagcgacttacctgtgaatgctccacaagttcacagctctaagggtatgcattaaacatttcagtgggtaaagagaagtgtgtataccttctaaacctgcataacattggcgatgtggacccgtc

SEQ ID NO: 1477 - DNA, 744 bp, Unknown
  Ga0395631_0033223 JGI
gtgacagtgaatcacgtcttcgttctcaatcaaaatcgtgagcctctcgatccggtccaccctgcggtggcccggatgctcatcgatggcggccaagccgccatcctgcgacactcccccttcacgataatcatgaaaatgaccgtggacggaccaacccacacctaccgcatcggagtcgatccgggcagccggaagacgggaatggtcgtggtggacaatgagacgaacgaggtcgtcttcgcgatggagatcaagcatcggggaagtgagatcaagaagtccttggatcagcggaggggagtccgccgttctcgaaggtcccggaagtgccgacatcgggaaccacgattcctgaatcgagcgagaccgaaagggtggcttccgccctccatccagagtcggatcgaaaatgtggtgacctggattgggcgattttcccgatcagttccggtcgttcagatcaatctggaagatgtgaaattcgacacgcagctcctacagaatcctgacattcgtgggtttttatatcaacaaggagagttgtggggctacgaggtcaaagaattcctcctctccgtgtggagacacgagtgtgcctactgcgggaagaaagatgttcccctcgaggtggagcacatcattcctaagagccggaacggatcagatcgaatctccaacctgaccatcgcctgcgtctcctgcaatcggaagaagggaaagatgacggctgcggagttcgga

SEQ ID NO: 1478 - DNA, 317 bp, Unknown
  Ga0395631_0033223 JGI
tccaagtcttccactgaaagtcggaagcctgtggcgaaaccctggcttggttgaccagactctgtgaagtgagaccgagaggcctcgccgaactccgtgcgattggtcacgacaccttgggatgcaacgccagtcccaagctctgtcgtccggtttcatgaggattgaagaggatagctccgaaggagccggaccgaacaagcctttcgcacattgtcgaggcgaacgtggctcatgagaatgagcctgacacccgtgagggataacacccaagcggagacactcaattttcttttcggagagtgacagtgaatcac

SEQ ID NO: 1479 - DNA, 1296 bp, Unknown
  Ga0137383_10023908 JGI
atgtcacacgtgttggtcattgatcaggacaaacggccacttgatccgatccatccgggctacgcccgcaaactgctctcgtccggcaaggcggctgtgtatcgacgctttccgtttgtgctgatcctcaaacgccaggttcccgaagctcacccccagcccctgcgtctcaaaattgatccggggagccaaaccaccggcctggcggtgctcaacgatgcgaccggacaagtggtatgggctgcggagctcatccaccggggggagcaagtacacgcgggacttcagaaacgcgcaggggtgcgccgtggacgccgttcccgccatacacgttaccgacccgctcgctggcgcaatcgccgtcgccccaaaggctggcttcctccttccttgtgctcgcgggtgcagaatgtggagacctggacgaggcggttgatccgttggtgcccgctcggtgccatctcctacgaggccgtgcgcttcgacacccaggcactccaaaacccagagatcgagggggtagcctaccaacacgggacccttgccggcttggaggtcaaagaatacctgttgctcaaatggggatatagatgtgtctattgccagaagacgggtcttcccttagaaattgaacatattgtgccgaaaattcgtggaggaagcaaccggatcaccaatttgaccctggcctgtgaggtgtgtaatcagaggaaaagccatcaaactgcccaggaattcgggtttcctcaggtccaggcgcaggcgcggcagccgctaaaggatgccgcggcggtcaacgcgacgcgttgggtgctcttcgcgcgcctgcaagcgacgggattgtccatcgaaacaagcacggggggccggaccaaatggaatagaaagcaacgcagcattccgaaaacccattggttggatgctgtgtgcgttggtccatcgactccggaacgagtggactggcagcaggtgaccccgctgctcatcagagccagggggcgacaatgccggcgcatgtgtaatgttgacgagttggggttcccaaggagccgtcccagagggccgagcaaggtctacggctttcaaacgggggatatgattcgtgcacgggtcaccaaagggaaaaagatggggacctatgttgggcgagtcgccatcaaaacagatgggtatttcaagattaccggcaggcatggcatggtcgagggcattcatgctcggtattgcgcgcccattcatcgcgatgatggctatgggtatacccaaggcaaagcggcgcttcctccccaggtgtga

SEQ ID NO: 1480 - DNA, 291 bp, Unknown
  Ga0137383_10023908 JGI
gtcagcgaccccacgcccaagggcgggggcttgcttcggcagccccgatgctgagcagtccccaggcatcgcgcctggtagtccttcgcgaagaatgtataggcactccggggtggccttccagctccggactctgcggcgatccgttaaacagcgagatggggtttcaatcgcagtgcggctcgcaactcaaggaaaccttcgctgaagttggacgaggaaaaccttacctgggcaaccagaggcccggcaacgggcaaacgaccaaaggagccaatcgtcatgtcacac

SEQ ID NO: 1481 - DNA, 1044 bp, Unknown
  Ga0208478_1004398 JGI
gtgaatcaggtgtctacgtttccgataggtgagcggatccaccaggccgtgcttcctcagcggcttgctctggaactcgcgtcagcagacacggctggggtagctccgaaacggggcgcgagcgctgaactttctagttcggcagccagtcgggaacatgatcaaggggagacccgccagccgcacccggccggcgggcgtcacgaaaccacagccagtcaagtggttgtggcaacagatggtgggagtgattccaccgccaaatcacatggacctgcagtgccggcagcaacagcagtacaagacaaccgggcaaccccctcgatggtggcggtgctcgacaaacacggcaagccgctgatgccgtgccacccagcccgcgcccgggagctattgcgcaaaggccgggcggtagtggcgcatttcagcccgttcgtgatccgcctgaaggaccgcaccctggaacagtccgaagtcgagagcgtgcaggtcggcatcgaccccggctccaaacacaccggcatcgccgtattcgggttcggcctcacgaccggggacgcccgcaagggaatgttctcggcccagttggaccaccgcggtcagaagatcagcaaagccatgacctctcggtcgcagatgcgccgcggtcgccgatcccgaacgatgcggtaccgggcgccgcggttcgccaaccgcaggaggccgaacgggtggttggcgccgtcgttgcgtcaccgcgtcgagggtgtcatgtcctgggcatccaagctgcagcggtggtacccgatcaccgggtggcatatggagctggtccggttcgacctgcagctgcttgaaaccccggagatcagcggggttgagtatcagaacggcaccctggccgggtacgagttgcgggagtacctgctggagaagtggcaccgcacctgcgcatattgcgacgccacaggggtgcccctcaatatggaccatatccatccgaagtcaaagggcggctcgaaccgggcgacgaacttcacgttggcgtgcatcccgtgcaaccaa

SEQ ID NO: 1482 - DNA, 314 bp, Unknown
  Ga0208478_1004398 JGI
gtcaatcaccccgcgctggcgtgcggggcttgttcttcgctgtgagcagcggtgggcttgccccgttcgcgagggttcgtttgaccagatcaagacaccacgtatgggattgaggtgaatcaggtgtctacgtttccgataggtgagcggatccaccaggccgtgcttcctcagcggcttgctctggaactcgcgtcagcagacacggctggggtagctccgaaacggggcgcgagcgctgaactttctagttcggcagccagtcgggaacatgatcaaggggagacccgccagccgcacccggccggcgggcg

SEQ ID NO: 1483 - DNA, 303 bp, Human gut metagenome
gtgtcagaaatgacaaattatgcttttgtgttagatgcgaatggaaaacaattggcaccaacaaaagagcagaaagcttggtttcttattcgtaaaaaacgtgcgacattggttaataaatatccaatggtaatacaacttaatataacaattccaaatggtggagatacagctaataaacgaattgattggaatattgaaaaatcacatagcaatgctgctatttgtattaccgacttgcaaccagatgtatatgaaattaaagagtggataataaaaccaatgcgtagacaaagtaaagct

SEQ ID NO: 1484 - DNA, 286 bp, Human gut metagenome
tattaaatataaataaaagtggacatataactttttgtttgtggcttaatagtaggtttcaagcctgagtgactgctactatcgaaagatatgttgtcgatatgaactatgttagatagtaaggtaaaaacacacctttagatgtaatcttcagtctaaagctctgtgagtgccaaccaagaaacaatgctaatgtcctgcattgataacagggaaacacatattctctatctgacattggcaagaagagaaatgctccgaaagaaaggtgtcagaaatgacaaat

SEQ ID NO: 1485 - DNA, 879 bp, Unknown
  Ga0066650_10013185 JGI
atgaaaaatacacaacagaagttaggaaagagaaatacatacacacctacaaatacttcacaagtttgtagctctgtggttgtgtctttaaacagagaggaaactctcagtgagcatggcttaaaaacctttccaaacagcctcgatgtgaacaaacagtctggcaagactggacaggatttgagaattcctgttttaaatatacgtggaaaacctttgatgccaacaacaccagcaaaagcaaggcatttgttagaacaaagaaaagcaaaagtaatcaaaagaaaaccatttgttatacaattgacaatagcaacgggagagactaagcaaaagattacattaggaatagatagcggatatagtcaagtaggattcagcgcaaagacagaaaaagaagaattgatattaggagaactaactttaagaaaagatgtatccaaaaagttagaagaaagaaaaaggtatagaaaacagaagagaaataagttatggtacagagaagcaagatttgataaccgagtaatttcaaaagaattgttagcaccaagcatacagcacaaattggatacacatgttagattgattgaaaaaatcaaaagtttacttccaatcacaaaaacaataattgaaatagccaactttgatacacagaagatgcagaatccagaaatatcaggaataaaatatcaacaaggtgaattacaagggtatcatatacgagaatatcttttagacaagtttggcaggaaatgtgcttattgcaatcaaaagggtgttcctttagaggttgaacatattattccaaaatcaaaaggaggaagtaacagagcatctaaccttacaatctcatgcagtaaatgcaatttagaaaaaggt

SEQ ID NO: 1486 - DNA, 279 bp, Unknown
  Ga0066650_10013185 JGI
gtcaatcaccacaccctaaataatagattttaggatgtggcttgagccgtgaggtttgagagcgattggttgattagagggttgaaaaagtatgaaaaatacacaacagaagttaggaaagagaaatacatacacacctacaaatacttcacaagtttgtagctctgtggttgtgtctttaaacagagaggaaactctcagtgagcatggcttaaaaacctttccaaacagcctcgatgtgaacaaacagtctggcaagactggacaggatttgagaat

SEQ ID NO: 1487 - DNA, 1284 bp, Microcoleus chthonoplastes
atgcgcgttttcgttctagacaaaaacttacagcctcttgacccttgccatccagcacgggcaagagaattactgaacaaagggagggctaaagcattcaagcgctatccatttactattgtcctgcaagacagaaccgttgaagagtcagtcacgcacccacatcgggtcaaaatagaccctggcagcaaaacaaccgggattgctgttgtccaggaagaaacagggcgagtaacaagcgccattgaaatctcacaccgagggcaacaaattaaagattccctcttagctcgcaggtcattaagaaggggacgccgtaaccgtaaaacccgttaccgccagcctcgtttcttaaacagaacccgtaaaaccggatggctaccaccatcgctggagagtcggattgccaacattgaaacttgggtacgacggattaaaaaactctgtccgatttcagccatctctcaagagctagtcaggtttgacttgcagcaaatgcaaaaccctgaaattagcggagttgagtaccaaagaggtgaactgtttggttttgaggtcaaagagtatttacttgccaaatggaacagaaaatgcgcttactgcgaggttgaaaacgttccgttcgagattgaacacattctggcaaaaagtaagggtggttcaaaccgagttagtaatctttgccttagttgtcattcttgtaaccaagttaaagggaacagacctgttgaagaattcctaaaaaagaagccaggagtccttaaacgggtattagctcaagccaaagcacctcttaaagatgccgcagccgtcaatgctacccgatgggaactgtatcgaaggcttcagtcaactggtttacctgtagaggtaggttctggaggtcgcactaagttcaaccgtaaaaccagagggattgaaaaagctcacgctttcgatgcagcctgtgtcggagcatctactcctgaacgattattaattcgaggaatcaaacctctaaaaattgccgcaaaaggacgcggaaccagacaacgttgtcgccctgataagtacggatttcctaaagctcatgctcctaaagccaagtatttccagggtttccaaactggcgacattgttaaagctgatgttcaaaaaggtaagttcgcaggtcaatatattggtcgaattgcgattcgatttagacctagttttgtcttgcagttaccaacacaaaagtttgatgtacatcccaaatacttgagaaccattcataaagcagacggctatgaataccaatcctaa

SEQ ID NO: 1488 - DNA, 250 bp, Microcoleus chthonoplastes
gtcaacaactcaccgctaagttctatcgaactatagcgggagcttgtaaaaacaggctctagttgaccagactaagttctacgagaactacgttatttagctcatgacaccctaagatgcgtgccagttttaggctctgtcgtacagttttaaacaggtgtagagagttaagccagtgagctgtacctaacaaggctagataacattgtcgaggctaactttaccagtaatgagaggtgcagtaatgcgc

SEQ ID NO: 1489 - DNA, 1155 bp, Unknown
  Ga0302349_1003924 JGI
gtgactacgttgcacacacgcgagaagacccaccaggccgtgcttcctcagcggcctgctctggaatcgacgtcagcagacaaccccggggcagggacgaaacggggcgtcgagcctgggaccacccaggacacgggtgtgcaccgtgggcgaggggagaccgcggctccggccgcggcgtcaccggggaagggctcgttcccgcccccggacggcgggagtgatcccgtcacgcacgagcatccggcatccgagggtgggacctcgggtgcgcctcgccgcgccgaggcgcgggtgctcgtcctggatcggcgcgggaagccgctcatgcccacgactccccgtcgtgcgcgccagctgcttcgttccggccgtgcccgagtgcatcgggtgcagcccttcgtcctccggatcgtcgaccgcagggtcgaggactcggaggtccagcccctcgtcctgggcatcgacccgggattccgacataccggcgtcgccctggcgcgcgagcaggaggtccccgacccccgcaccggccgggcgacgacgatccgacacggcctcttcctcctgcgggtggaccatcgcggcgccgtgatccgcgaccgcctctcggcacgctccgccctgcgccgcggccggcgctcgcgcaagctccgctaccgtgcgccgcgcttcgacaaccgcgcccgtgccgcgggatggctcgccccgtcgatccgccatcgggcggagaccaccgtgacctgggcacgccgcctggccgcctgggcacccgtgacgcggatcgacctcgaggtcccgcgcttcgacgcccgtgccctgcatcggcccgatgtcgccctgggcgaccgcggccagggcaccctgcacggcaccgaggtgcgcgagtacgtcctggagcgcgacggccgggcctgcgtgtactgcggtgcgagcggcctgggcgccgcctccgtcccgctcacgctggaccatgtgagtccccgggcgcacggcgggccggacgtgccggcgaacctcgtcgccgcctgcgtcccctgcaaccgcgacaagggcgaccgcgaggtggaggagttcctcgcccgccggcccgccgtgctcgcgcgggtgcgccgcagcctcgcctccgtcatgcaggaggacctctcggtctcc

SEQ ID NO: 1490 - DNA, 289 bp, Unknown
  Ga0302349_1003924 JGI
gtcaggcgccccaccacagacatcgacgggccccagggcacatcggtggatgtcgagtctgaccagctcgagacaccgctcagagggaggtgactacgttgcacacacgcgagaagacccaccaggccgtgcttcctcagcggcctgctctggaatcgacgtcagcagacaaccccggggcagggacgaaacggggcgtcgagcctgggaccacccaggacacgggtgtgcaccgtgggcgaggggagaccgcggctccggccgcggcgtcaccggggaagggctcgtt

SEQ ID NO: 1491 - DNA, 612 bp, Leptolyngbya sp. IPPAS B-1204
atgcgaattccagttgtttcacgcgataatcaaccactcatgccaaccactccagcgagagtcaggaggtggattgcatcaggtaaagccatcaagaagtggtctgacctgggagctgttgatggattagctctggcatgttctgaattcgttaactacgagtcgttccatatcgcgaacactcgcggtcatgcttggactggttcagttcagttaacgcctgctattttcagggtgattcgcagacctcccatttctcgcaggcaactacacttaatggttccctccattggtggagtacgcaggaagtatggcggaactacaacacggcatggagtcagaaagggggatgttgtcaaagctgaaatggcgggtcgggtctctgtcggctgggtcagtggtgacactcaaagacagatttccgtgtctgatagcaattggaaacgcttagggcagtttacggcatctaaagtgttgttgattgcccgaaatactgggttggtggtttcgggggcatcgttggcgcagcctgcgcggagcgcataccccactcaaccaccgctcctatccctccccatgcctaaaggcaggggtatctcggaggaagtttga

SEQ ID NO: 1492 - DNA, 227 bp, Leptolyngbya sp. IPPAS B-1204
gtcaggaaccccatagctagaagctaggggcttgtccaaaccaatttgggcaacgcaagttctgactagcccgtagagccttcacctggtacagacttccgaatacttccctagttcggatttactctaagcctgattggttcagacgttggttaatgccaagacatcctggttgaggtgggcgaagggacttaaacaaagcaatttgggttataccaatcatgcga

SEQ ID NO: 1493 - DNA, 1140 bp, Unknown
  Ga0114918_10006480 JGI
atgccttgtagttcaagaaaagctagactgctacttaaaaatggtaaagctaaggtagcccgtaggtgtccttttactattaagatactatatggctccagtggctataagcaggaagtaagagcttctttaattccaagtagttctaaagtaggtatagcttgttcttcaaatgggacttgtctatactcttctgaagtagagttaagacatgatatttcaaagaaaatgaaaagaagatcttcttacagaagaactcgtagaaatagaaaaactcgttatagagaatgcagattcctaaatagaaaatcagatagaaagtttactccaactatgatgtctaaatttgaaagtcatgcaagagaaattcaaagattatctaagctacttcctattagtaattggatagttgttaaaaattctgttaagaaagattatcaaggacctaaagatttagagtggttaaatctacaaaggcaaacttttgaaagagatagatttaaatgtacttattgtaaaggtaaatctaaatgttatgaactacatgctcaccacctaatatttaggagtgaagggggagaagatgttttagacaatcttattactctatgtaaaaaatgtcatgtatcttatcataaaggagagatagagcttaaaaagattaaaagtaaaggaaaaattgatactgagtcagccatcattagaaagaacttaaaaattcatgataatatccaagaaatctatggttttgaagttaaagctaagagaaaactattaaacttaaagcctacacctattaacaatgcttgtagtattttagaaatattatcagataatagttattatattaaaaatgtttctaaaggagattatcaaatgacaaaaggtgttagaagccagatgataattcctaaaggtaaaatatttggatttaataagtttgacaaagttaaattcaaaaataatatttacttcattaaaggtagaatgagtactggttattttatagggatggatattttaggaaataccttaaaaggtaaaactctaaaagctaaagaatgcaaactaatttcaaggagatcttcatgccttataacagagacggtagaagaaaatacatgttacaatgccatctaa

SEQ ID NO: 1494 - DNA, 304 bp, Unknown
  Ga0114918_10006480 JGI
gtgaatcacccatagtgccttcgacaactatgggcttctttgtgaggaggagttaaactgttcaccagactctgattagagaaatctaatctacgttattttagttagtacacctaagaataccgcctcagttcttagctctgtagaggctctgtaaacagggactaaagttccagtcaacttcaggacagccagacatttctggtaagctattataacattgttgagaggaagttaggattctttaattggtaatagattaaagatactcaatactcaggaataggagatatacttaatgtta

SEQ ID NO: 1495 - DNA, 1299 bp, Unknown
  GENOME_ACESSION: mgm4799983.3 MG-RAST
atgaacagagtttttgtattaagtaaaacaggtaagacgttgatgccctgccatccggcaagggcaagacagctattgcatagcaaaaaagcaagagttaaacgtctttatccttttactatacagttaactcagcgttcaaaaggatatatacagcctgttgaactcaagttcgatccgggttcaaaacaaacaggtgtagggctggttttacatgggaaaaacaggctgtctgccatatatgccgcagtgttaacgcatcggggacaggaaataaaaaacaatttagactctcggcgtatgataagaagagccagaagaaaccgtaaaacccgctatagacaggcacggttctttaatcgtgtaagaagtaagcataaaggatggttggctccatccgtccagagccgtgtagataatatagtagaatggtctaagcgtttcatacgattggctcctgttggttttatcactgttgaatcagttaagtttgatatgcagaagatggaaaacgctgcagttcaaggagtggagtaccagcgtggcacgctgtttgattatgaagtaaaagaatatttgcttgagaaataccattatagctgcgtctattgtggaacaaagaatgtgccatttgaaaaagagcatgttatcccacgtagccgtggcgggagtaacagaataagtaatctggtgttatcctgtcatgattgtaatcagaaaaaagataacttgccaatagaagtgtttttaaaggataacccggcgttattgaaaaagataaaagcacaattaaaaagttcgttaaaagatgctgcagcggtaaacataacccgtaaacaaatcgtaaaagaactgtctgatttaaatgtgcctgttctgacaggaacgggagcggaaacgaaatacaacagagtaagtcagggatatgaaaaggagcattatatagatgcgttgtgtgcaggcacaacgggagcgaagatatatatccctaaaaagttaaagccgttgttgataaaaaaggaaagaagaaataacaggcagatgtgtctggtggataaatatggctttcctagaggaaaagcgaaaggatctaagatagtgcatggatttaaaacaggtgatatagtgaaagcagttgtgttgaagggaaagaaaaaaggtgtatataaaggaaaagtagcggtaaggtcaagtggaagcttcaacataaacgtaaaacaaggaagagtagaaggaataggctggaagaactgcgtaatgctttaccgtttcgatgggtatagctatactacctattag

SEQ ID NO: 1496 - DNA, 337 bp, Unknown
  GENOME_ACESSION: mgm4799983.3 MG-RAST
gtcagtaaccccgccctgtcggacgaggcttgtaactgaaaacagccttatcgttttcctaaacaagtctccgacttggattaactgaccagccttagtctgtgaaacgctgagttttacagactacgttaaaaaacagatgacaccgtagaatgcttctccagttctatgcaatgtcgtaatacattaaacatttctttggggtaaggaaaagtgtgtgctacatgaaatgttttttaactttggcgaggagatattactttatgaaaaacgccgtttttcataaaagataaaaggtaacttattaaaaaataataaaaggaaagtaatgaacaga

SEQ ID NO: 1497 - DNA, 921 bp, Unknown
  Ga0307376_10007847 JGI
atggtgtatgtattggacaagcgcaagagacccatgaacccttgcaccgagaaacgggctcgcctactcttggaacgcggccgggcggtggttcacaagatggcgccgttcacgatccggttaaaggacgtggtggccgccgacctgcccggatttacgctgaaactggaccccggttccaaagtaaccgggggagccgcaatccgggacggaaaagaagtcgttggatgttacgagtgtcaccaccgaactgacatcaaagacaagatggacgcccggcgggggcaacgccggagccgccgggcacggaagacacgttataggaaaccctgttggggcaaccggcacccggagaagtgcgccgcctgcggtgggaacgcgaaacacggcagccggtactgccgtccctgcgccgcggtaaggcacttcgttgacaacggctgccgggagacctggctgccgccgtcgctccgtgcccgcgtggaagaaaccctattctgggtggaaaagatgcgccggcttctgccgatcaccgggattgcaatggaactggtccggttcgacacccagttgatggagaaccccgacatctccggggttgagtaccagcagggcactctgaccggctacgaggtccgggagtatctcctggagaagctcggtcatcggtgtgcctactgtcggggtacctcgggggatccggttcttaacgtggagcacgtggtaccacggaacccggctcaaggaccgaaaggcacggatcgggtttcgaatctggttatcgcctgcaagacgtgcaatgacgcgaaggacaacctgcagccggaagaatggttgaaacagttgcaggcttccggaaagaagattgatcaggtacgggcggagaacctgcccaatgttctaaagcaacttaagcaaccc

SEQ ID NO: 1498 - DNA, 350 bp, Unknown
  Ga0307376_10007847 JGI
gtcatagacccacgcctaaaggcgggggcttgcggaggaaactccaaaagtccacgtcttaaggcgagaaagcggtatgaagttaccttcgggtacaaccatatcgcgctatgacccacccaagcccgccgggacatccaggcgagcgggctacgttatcttggtcatgacaccttgggatgcttctctagtcccatgccctgtcgccggtggttaaacagtaagccggggtgcagcgagcagtgctgtcggcgcaaaaagccgggataacattggttaggagagatgccggcggaagccggcgcgtcacaggctccgcaaggggtctccgaaaggggatgcacaagatg

SEQ ID NO: 1499 - DNA, 1137 bp, Unknown
  Ga0209800_10000857 JGI
atggctgatgccgacaaatccggcaaatgccagaattttgctcaagcagggcagggcaaggcaaaggtgattcaaagaacaccctttgcaattcacttgctttatgagaccaccgagcatattcagccggtgaccgttgggattgatgacggagggatcaatatcgggattgcagcggtttcaaacggcaaggttttatttcaacagaaagttgttttacgttcggacgtcaagtcaaaactggatacccggaggcaataccgtaaatccagaagaaaccgcaaaacaaggtatcgaaagtcaagatttctgaacagaaagtcatccattcccacatgcaaggtgtgtggcgggaatgccccggtatctcaggtgatctgtcgatcctgcctgaacagagcggatggggttcatcaaaaatatgcgaagatcaaaaaaagtgttttccgaatcccaccatcaatcaaggcaaaaaaagatgcgattatccgggtggtcaagcagatcccactgcccatttccagaattgtgctggaagatctctatttcgatttccaggcaatggagaatccggacatttccggtgagcagtatcagcatggagatctgctttatcacaagaatttcaaacaggcgtgtctggtgcgtgacaagttcagatgccgtgtttgcggtgcgcaaacaaaactgcaatgccatcatatccgtcaaagggcaaagggcgggacagacaagctctcaaatctgatgacgctttgtgatgtctgccatgatcgacatcataaagaagggctcaaacttccgaaacaaaagagttccttctacatgtcggcagcacatgtccagcagggaaagcactatctgcaagctaagttgtcacgaatcgcgccattacggacgacattcgggtatatcaccagtcattttcggaacaatgccgggatagaaaaatcccatgtcaatgatgctgttatcattgcagataaacaggcaagtcctctggaccggcagatacagacaaaacatgtgcagtcacggaaaagaagtttgcatgaagcaactgcaagaaaaggaaggaaaaccccgaaccgaacccagaaacggaataacaaaaacgtatttaccctgaaaggtttt

SEQ ID NO: 1500 - DNA, 263 bp, Unknown
  Ga0209800_10000857 JGI
gtcaactacccctcctgaatcaaagattcagaaggggcttgtaaaagcccaagttgactagcctcagtctctttattagggactacgttcggcaggatgtagatacctttggatgtaatcgccagtccgaagctctgtcgtggctctgtaaaagctctgtgaggaaggagcggttaaccacgttgtgaagcctgctgaacattggcgaggcgaaccttacccctctttggagggtgtgcataactgaaaggttttttatgaaa

SEQ ID NO: 1501 - DNA, 1209 bp, Unknown
  Ga0180438_10006853 JGI
ttgagagtacctatctatgtgttgaacatcagggggcaacccctcatgtctaccacacaacacaacggcaagaagttgttaaaacaaggcaaggcaaaagttgttcagagatgtccttttaccattcagttgaactatgcaactggagaggcgacacaaccgattaaactgggagtggatattggatatacgaacattggatttagtgccaagaccgataagttagaagtcataagtggcacgctgaccttgcgaaataatgtttctaacaagctagaggaaagacgcaggtatcgtagcacgcgtagaggcagattagggtatcgaccaccacgatttgataacagaacacgacccgaaggatggttcgcccctagtattcagcataggcatgactcacatattcgattagttgaaacacttgaaacactgctaccgattacctacgaaaaggtagaagtggcgaatttcgatgcgcacaaaatgcagcatccagaaattacaggcgtcgcatatcagcagggcgaacttcagggctatgaagtcagagaatacctgttagacaaatggggacgaaagtgcgcctactgtggtgaaaagaacgtgccattagaagtagagcacatcattcctagaagtagaggtggaacagaccgagtatcgaatttgacgatcgcatgtaggaaatgcaatctaaagaagggagataagaccgcagaggagtttgggtatcctactatacagaagcaggcaaagcaacctctgaaagcacctgcatgtctgaataatattcgttggaaattagtagaacagttaggagcagagcatacctatggatacgtcactaagtacgaacgtaacaaattagggctggaaaagtctcatgttaatgacgcgtttgtcattgctggaggaacaactcaagagcgctgcaggtcttatgaagtgatgcaagtcaggcgcaataatcgttcgctacagacgaatcgaaagggattcaaaccctctattaggaaacagcgataccagttgcaaccccacgatgtggtaacttataatgggaaagtataccaagtcaaaggggtattcaattatggcacctgggtacgattacgtgactcacagggagcggtcgtcaacaccaacattaaaaacgtgaaactgttgaaatatggaaaaggcttagtatttaccttcaaaaacaactaa

SEQ ID NO: 1502 - DNA, 289 bp, Unknown
  Ga0180438_10006853 JGI
gtcaatcaccccctagcaagtgagggggcttgttccgtgaggagtgagagtaattggttgattagcctaagagaggtcatggtggaaacaacatggcgacatctacgttatcaggagagttcaagaacacaccaggggatgcttctctagtcccttgctctgtaaatggtggtttaaacagagaggcaactctcagtgatcaccgtatagtactgactgataactttggcgaagagaaccaaccgactttaaagcaatttaaaggaggagataggacttgagagtacct

SEQ ID NO: 1503 - DNA, 1287 bp, Unknown
  Ga0098074_1007018 JGI
atgcagtcaaacagggtctttgtggtgaatagcagtggggaaccgctgatgccgtgccatccggcacgagcgcgaaagctgctcaaggttggacgggccaagattcaccgttaccaaccgtttgcaatccagttgttggattgtgagaatcaggacgtccaaccggtagaggtcagggtcgatcctggcagcaagacgacgggcattgctctggtggcctatggcaaacgtgggggtagggtcgtgtgggcggcagagctacagcatcggggctggattatcaagagtcggcttgagaagcgtagtgctgttcgcaggggccgacgccatcgaaaatgccggtacaggcccaaacgctttgacaatcgaaaacgtaacaagtttgaccgttggttgccgcccagcttacagagcagggtggacaacattgatgtgtggataggccggctctgcaagtacgcaccgttgcgctgggcggcggtcgagacggccaagtttgatacccagaagatggaaaatcccgagatctcggggattgaataccagcggggtaccttggccggatgggacgaacgcgaatacctactggagaaatggggtcggcgttgtgtgttctgtggtgctgagaatgtgccgctccaggttgagcatttgatacccaaatcgagagcgggtacttctgagcgtacatataacaaggcgatagcttgcggtccttgcaatcaaaagaagggcaaccaaactgcggccgagttcggttttccagaactgatggacaaggccaagcagtctctaaatctaagggatgctgctcttatgaattccacacgctatgccataggcgatgcagtgaagcgacacctgcccactacgttctggacaggctcaaggaccaaaatgaaccgcataaatcagggctatcccaaagctcactggatcgacgctgcctgtgtgggagaggctggtgccgacgtgttcttgccgcaggggttacggcctcttcagataagagccgtaggtcgggggagccgacagatgtgtcgcatggatcgctatggcttcccgcgtaccggtcccaaaacggtcaaacgggtttttggtttccagacaggggatattgtcaaagccgacatcccaaagggcaagtatgctgggctacacattggccgtatatcctctgtccgtgcctctggaggttttagtttgaaatcggtaccaaaggtcaactggaaatattgccagctaatccagcgggctgatggatacgaatatggatggattgactaa

SEQ ID NO: 1504 - DNA, 353 bp, Unknown
  Ga0098074_1007018 JGI
ggacacacccgtttcgcccttacccatgtggggcgaaccctaaccttttcgtgtgaaatggatagggtcgctacgaaaccagtcacagccaggggataatcgtcgtgattatcccaccgggctacgttaccgctgaatgtataggcaccttggggtgcttctctagccccaagctctgcggttggtagttaaacagacctgataaggagggtcggtgctgccagcgagaaaccagtggataacattgacgaggagacgggcaaatgggcatagccccgatgcctaaaccaccgaaaggtgagaacccggcgtaagccgggaaacagaaagagaagggaatgcagtcaaacagg

SEQ ID NO: 1505 - DNA, 1242 bp, Unknown
  Draft_11733483 JGI
atgaaggtatatgtaatcaacaagcacgggagaccgttgatgccttgtagcccgagaaccgctcgtttacttttacgagataaggccgcgaaagtaatcaaacgagatcccttcactatcaaaattctagtcggagttaaaggctacacacaagatttaactcttgggattgatcctggttcaagatacattggttctgccgttagagatgataaaaatcaagcttattatctatcacaagtagagcagcgtactgatgttaaagcgaacatggatcaacgaagaatgtatcgacgaactagacgtaatcgtaaaactcgatatcgtaagccaagatttatgaatcgaaaagctagtactaaagacgatagatatccaccaacgctagaatctaaatatggagcaatcgtaagagagatcaatttcgtatgtaatattctcccgattaagaaattgtatatcgagattgcgaagtttgatacaagtgctcttacgaatccaaacgtacttgagtatcattggttgtatcaacgaggtccacagcttggattctacaatactaaagcgtatatactctttagagatacttatacttgtcagtattgtaagaacaagagaaaagactctcgattacatgttcatcatattcaacacaagtttcaaggcggaacggatcaaccgaataacttaatcacgctttgcaaatcctgtcatgatgatctgcacaagaaaaagattatgcttaatacaaagcatttaaacacaataaataatcttaaacatgcttcacagatgaatgttttatgtagtatgattaaaagtagatttgtttctggatcttatatcgagacgcttggtggaattgcaaaaggtgttcgagagaattttcaatatccaaaggagcattattgggacgctttctttggaagctttgaaaacggaaacactccaaaactattaatagaccgagtactgatgaagaagtgtgtcgcgaaaggatcttatcaattgactaacggtaagagatctgagaaacggttaccaactggaaagatttgtggttatcgagtctgggacaaagttttgtatcaagatcaacagtatttcgtaagaggtcgtatgtcgactggttatgctaatctttgtgacatttcgggtactcagtttaagattcgtccgatgcctaagtttaataaaatgacaagaattggagcaagagattcatggattatgaccacataa

SEQ ID NO: 1506 - DNA, 278 bp, Unknown
  Draft_11733483 JGI
gtgaactacccattgattaaagatcgatgggctttggatcaaaccggagccggagatcaccagactaagtactaagaaattagaactacgttatttatgatgcagatacctttcggtgccgcctcagccgattgctctatcgtggctctgtaaacatcctgcggaaagggaagtcaaccacatcacgaagcatagataacattgtcgagaggaagtcgaatttactcgctggtaacaggtgggtaatacgcattactccttaaggagctcatatgaag

SEQ ID NO: 1507 - DNA, 1380 bp, Unknown
  Ga0104854_10039936 JGI
atgaaccaggtatttgtgctcagtaccacgagacagccattgatgccgtgctccccagctcgtgcgcgacgattgttaaaagccaagcgagcggcggtcttccgacggcaaccttttacgattattctcaaaggtcgaatcgctggggctacccaaccagtggcttggcaaatggatccgggaagccgcacaaccggccttgcactcgtgggcgagtttcccgatcagggccgggtcgttctgtgggctggcgagctgcatcatcgaggacacctcattcgccaaaagcttctagcccgtcgggcaatgcgccggaaccgtcgatttcgcaagacccggtatcgggctccccgatttctcaatcgccggcgcgcagaagactggcttccaccctctctcaagtcgcgtgtggataatgtcgtgagttggacaagaaaaatccaacgtcttgtgccgattacctcgatcgcgatggaacttgtgcggtttgatacccaaaaactcatgaatcctgagattgagggggtggcataccaaaggggtgagctgtttggctatgaagtccgagagtatctgctcgagaagtggaaccgtacttgcgcatattgtcacaagatcaatgtgccgttggaaattgagcatttggttccgcggagtcgtggtggcagcgaccgtgtgagcaacctcacgcttgcctgcacgaaatgtaatcaacgaaagggtaatcagacggctacagagtttggctatccgcagttgatgaagcaggcccagcaaccgctaaaggatatggcggccgtaaacaatacccgctgggcgctctatcggcaactgcagtcactcggtctcccagtctcagcgtggtctggcgggcgaaccaaatacaatcgtacccaacaaggctaccccaaagcacattggattgatgcggcatgcattggagagcacatgctcctgcttgatcctaatatgagaccgctgaccatcacagctgtgggtcgtggcactcgccatgtcgttcggactaacaagttcggttttccgttagcaagggcaggtcgaattaaacgactctgtggttttcaaaccggcgatcttgtcgaactaatccagccgcgtggcaagtatgctggtcgatggtttgggcacctcaaagcgatacgtctgacagggtattgcgaactcagaacatcactgggcaaagtcggcgcgcctacatcgcgctttactattttgcaacgaatgggcggctacaaatttaccaagaaaggttccatctctagtgagctatctaagatcaatcttcttgggaataaatcagaatctatttcgataggagaatctaatggaagcaaaactctatcgatcagcgatgagtga

SEQ ID NO: 1508 - DNA, 329 bp, Unknown
  Ga0104854_10039936 JGI
ccgtctcggtcctatctatatgtccaacgtggtagcaaaaaaggtccgagggacattgaaaataattcttgacctgtctcaaccaggctccgtccccatcaattcagcaatgcattggtgatgggactccgttctgcgcgaatacataggtaccctgggatgcttcaccagtccgcggcactacggtcagcgattaatcagcacggcgtcgggacaacgggcagtgtcgttggcaaacaaaccgcgcgagaacattgccgaggtgaccataactcccatcatgggacgtggctgtaaagccaataaagaaaggaagtcagatgaaccag

SEQ ID NO: 1509 - DNA, 1116 bp, Unknown
  Ga0376082_0008098 JGI
atgcgagttccggtattatcaccaagaggaaaacctctgatgccagctaagcccagcagggtgaggcgctggctaaaagaagggttcgctaaagttgtcaagaacaaactcaaaatctttcaagttcagttagtagaagaaccatctgggacagaagttcaaggctgcgtagccggaaccgatcctgggaagctgtacaccggacttgcggtacagaccgcaaaagacacgctttggctagggcacattgtcctcccctatgcagtcatccgcaaacgattagatcaacggcgaatgatgcgtagggggcgaaggggtcgccgaattgatcgcaaactaccttatgcccagcgtaatcacagacaaaaacgattcaataaccgccggagcaaaaaactgcctccgtcgatccgagcaagtcggcagttagagattagcttgataaagacgctatgctctatctacccaataaactgcatagtctgggaaaaggttgtagctaaggggtcttcatgcttctctcccgtaatgcaagcgcagtactgggcaatcaatatcctagaaaaaagctgcggatgcgaggttcagcagctagaaggctgggaaacctctaacctccgacaatatctgggcttgcacaagcaaaagcatcaaaaaggagacgctataccagaaacccatgctgtcgatgctgttgctcttgcctccagttgttttgtttggtacaagcaacacaaaggtaaagcaggctggtgggaaggttcggtcaaagttacgcccgctccttttgttgtcattcgccgtccaccgattagccgtagacagctccacctaatgcttccctcaaaaggtggggtgcggcgcaagtatggtggaaccgtaactcgtcatggatttcgcaagggggattatgtttgcgctgaacaagcaggacgcatctactacggctgggtgtcaggcgacaccgccaagcaagtttcagttagcgattctagctggaatcggctagggcaattttctgttaaaaaagtccgtctgttgcagcgaagcacggggttaatcgtcgtgccttcagccggattgtcaaatctccccctattgaaggggtcgatttga

SEQ ID NO: 1510 - DNA, 247 bp, Unknown
  Ga0376082_0008098 JGI
ttcaactaccctaggctgctacgctcaagctgagggattgcccggagcaggacgggtgacgcaagtgttgaatacgaccgctgagactagcctcggtaagcacttctaggatacttctctagtccggattatctgcaaaaccgcttgttacggtttcatctaaaaggtggacatcctaggttagttggtcaaagagacgttctgtaaggaacacatactctgaaaggagaattatcttaaaatgcga

SEQ ID NO: 1511 - DNA, 2460 bp, Unknown
  Ga0373620_0000796 JGI
atgaagcagaagttaaaacagagaactaaaaagaacacacctacggatgctccacaagtccgtagcaactgtggtctgtcattaaacaaagaggaaactcttagtgtgtcaggctcaaaaacctgttttaacaatcccgaagtggatttatctcaacatacagagaggcttaaagccattgtgtatgtaattagtattgaaggacgcactttaatgccatgcactccagcaaaagcgaaaaaattacttaacggtaatcgcgctaaggttattaaattgtatccattcactattaaattaaattttgagtgcgagaatcaggcgcaagaaatcagacttggagttgattccggatttaacaatgttggaatgtcagccattacctcaacgaaagaagtattgtctcaaacaattacgcttgacagcaaaacatcaagtaggctgaccgaaagaagaatgtatcgcaggttaaagagaaacaaattatggtatcgaaaatcaagatttttgaatcgagggaatcaaaaagaaggttggcttccaccatcaattcaaaggagatatgacgctcatttgacgctaatcaagaatgcaaaatcaattctgccaatttcaaaagtcacaatcgaaactggcaattttgacatcgctaaaattataaatccagacattaatggcattggttatcagcaaggagatttgtatggctaccaaaatatgagagcatatctgatggcgcgagaacatggtttatgccagttgtgccacaaagaatttacaaaaggaaatccatcgcatattcatcactgcaaagagcgtcacgaacagggctctgaccgttcagaaaacttggcgataattcataagaagtgtcacaagaaattgcataataatggattaaaattatttactccaaaagagtataaagcaaatacatttatgtccatcatccaacataaattcaaacaagatattccagatgtaaatatcacctttggatacaaaactttcgttgaaagacaaaaactgggattagaaaaatcccacgccactgatgcgtttgttattgctggcggagcaacacaagagcgatacgggtcaattacaattcaacaaaagcatagaaataacagggcgattcaattaaacagaaaaggattttcgccttcaatccgaaagcaacgatatgctattcagccaaaagatttgatttggattaacggaaaaatattttcagttggcgggatgcaagacaaaggcacacgagttaaaattgaagattcaaaaaaggtttattctataaaaagtgtcgaaaaaatgtatcactttggtggattttttttacaactaaaaaaaatgaaacagaaaaaaataatgccttatacctctcaactaaatctaacaggttttacaggaaaatctcacaacaagcggtggaagcaggatgagattgatttcatccagcacaatataaataagccagtagattggctatcgtcccagcttaataggtctgagggttctatcaacacaatgatttggaaattaaaaaaggaatccgagactcagactacggttgcattacctcacgcatcatcagcaggacaacgattcgacataaaaaataatagcgacaagcccattaaaataatctcatcatcacctattgtattagagcctaacgaatccactaccatttccggctctacacctcactggcagaaccaagtagagaaggcaaggcaaatactggtagtcgaaggaatggctgagagtcaagctgacaccgagatgtcatacgtttattccatcttccacgaaaatccaactctcaaaaattgtcatcaagactcgatagtttccgcaatcattgacataggcagaaccaagagcacaattaatccagctttaaaacttgcataccttaaagccaaagacggcaaatgcgtattcgagctcacctatcgcggattaatcaagtccttgacagatagcggtagtataaaagttatggacgctcatatagtttatgaagatgactatgagttcgagtatcttccagccgagaataaaattacccataagccaaaagttgctaagaccgaagctgaaaataatgcacgccaaattgccggagcttattctgtcgccatactgaatgacggaacaaagcattatcacttcatggagatatggaagctcgcgaaaatagaacaaatgagtaccggaggcgagagcgactatttctataccgaatggaaaacagatatgtacaagaagtgtgcaatcagaagtcattataaattcctgccaaaaggaactacgctaccggaatacatccaacgagcaattatgattgatgatgaaaattcaagcatcatgatgagtagcagtaaattcggtgcgggcaaaaaaagaggtggaatgatggaatttttcaataatccaaaaattgactga

SEQ ID NO: 1512 - DNA, 263 bp, Unknown
  Ga0373620_0000796 JGI
gtcaatcacccaatccaaaagaaagggcttgagccgtgaggtttaagggtaacaggttgattagggagcgtaaattggaaacaatgaagcagaagttaaaacagagaactaaaaagaacacacctacggatgctccacaagtccgtagcaactgtggtctgtcattaaacaaagaggaaactcttagtgtgtcaggctcaaaaacctgttttaacaatcccgaagtggatttatctcaacatacagagaggcttaaagccatt

SEQ ID NO: 1513 - DNA, 1290 bp, Unknown
  Ga0180008_1007149 JGI
atgagctacgtatttgttttagacacgaacaagcaaccactcaacccggttcatccaggttgggcaagaaagctattatcatcaggacgtgcggcagtatataagagatatccatttaccattatcttgaaggctgccatcccttcagcggaaatacaaccattaagattaaagattgaccccggcagtaagacaacgggacttgctattgtcaatgacgtttcaggggatgtactgtttgccgctgaacttaaccatagggggcagcagataaagaagtcaatggatagcagaagggctattcggagaggcagaaggaataggaaaacgagataccgcaaaccacgtttcaataaccgcaggaggcaagaaggatggttgccaccatcgcttcgtagtagagtagagaacattgagacgtgggtagcccggctacaaaagttatgtatgattacagcgattagccttgaattggttaagtttgatatgcaagcaatggagaatcctgagataatcggtgttgaatatcaacagggagaacttcaagggtatgaggttagagaatatctccttgagaagttcaatcgtaaatgcgtctactgcggcgttgagaatgtaccattacaggtagaacatattgtaccaagagcaagaggtgggagcaatagagttagtaatttaactcttgcttgcgaaccatgtaataaaaagaagggtaaccaaacagcaaaagagtttgggtatcccaaagtacaatcccttgctaagaaaccattgaaggacgctgctgctgttaatgctacccggtgggcattatatcgtcggacggaagcaacgggattgcctatagaagtaagtactggtggtagaacgaagtacaatcgtagtataagaaagctacctaagacacactggcttgatgcgacttgtgtaggagcgtcaacgccagaagtcttggatgtcgaagggatacgtcctttggatattactgccactgggcgtggttcaagacagatgtgccgtgtagataagtacggtttcccgcgcacatcggctaagaagttcaaacgtgttcatggttttcaaacaggcgatatggttaaagctgttgtaccaactgggaagaatacagggacgtatatcggacgtatagctattcgggcttccggcagttttaacattaagacaccaaatagtaccatccaaggcattagctatcggtactgccaacttgtgcagcgacttgatggttatacttacgagagggagacggcattcctccccgcctga

SEQ ID NO: 1514 - DNA, 255 bp, Unknown
  Ga0180008_1007149 JGI
gtcaactacccctcctaattctccgaatcagaaggggcttgcgaaagcgagcttcaaggttgaccagctatagttctttgagaactacgttaggaacgaatgtataggtactgtcgtggtgcttcaccagcccgacgctctacggtatgttgttaaacagctaaagagggataagcagtgcagcatacaaaaaaccgttccgcaacattagcgaggtgactattactcttactcttcggagtaaggaggtgtctt

SEQ ID NO: 1515 - DNA, 1296 bp, Human gut metagenome
atggtatatgtacttaacaaaaacggacaaccacttatgccaacaaacagacacggaaaggtaagaaggcttttaaagataaacaaagccaaggttattaagcgttgtccatttacgatacagttgttgtataatacaacaaattgcatacaaaatattacattaggtgtagatgccggttctaagcatattggattatctgcaactacaaaagataaagtattgtttgaagctgatgtagaacttcgtaacgatataacaaaattacttgaggcacgaagaaaatttcgtcactcaaggcgaaatcgtaaaacccgttacagaaaaagacgatttaacaatcgagtatccagcaaacataaaggttggttggctccaagtattgagcataaaattcagactcattttgcaatggtagaaaaagtacacaagatgttgcctattacaaaaattgtagtagaaacagcatcgtttgatatgaaattgcttaaagctcaactggaaggtgaacccattccaaaagggacggattaccagaaaggtgagcttacaggttggaatatcagggaatatattttccaccgagataattacacctgtcaatggtgtaaaggtaaatcgaaagatttaattcttgtaacacaccaccatgcctactggaaaggcgaccatacaaacaaaccctcaagtctgattacactttgtaacacttgcaatgatagtaaatatcacaaaaaagaagctaataggctttggggttgggagccaaaaataacaaactcttataaacacgcggcctttatgaatgttatgagatgggtattttataatcggctaaaggaaatttatgcaaatgtttctatgacttatggttatattacgaaaaacactcgtataaaaaacaatctaccaaagacacattatttagatgcacgttgtattagtggaaatccaaaggctaagagtagtggagagtatttttactataaaaaggtcagatgtcataatcgtcagctatataaagctaatacgttaaaaggtggcatccgaaaacgtaatcaagctgagtatacagtcaaaggttttaaactctttgatagagtagaatatcagaatcacgaatattttatatttggtagaagggcatcaggtttctttgatattagaaatttaaatggccaaaaggttaacaaaggctctgtcagttttaagaaattaaaattaaaagaaacaaacaaaacttatttaattgaaaggtgtacggtggatacaagagatgatttagctcctctatga

SEQ ID NO: 1516 - DNA, 282 bp, Human gut metagenome
gtatagtcaataacccacgactaaagccgcaggcttgcaaaagcttttattgactagcctaagtgtttcaaacactacgttaaaagagaatatatagttaccaaagggtgttatacctagccttttgctctaaggtcggtggttaaacagttctgatgggtaggaacagtgttgccgatataaaacctcttattaacataggcgaaggtatcttacagtttgatatgtactggcttatagcatacaacatatcactattaaagaaaaggagtgtttgttatg

SEQ ID NO: 1517 - DNA, 699 bp, Unknown
  Ga0268283_1011674 JGI
atgccatgttcaccaagaacagctcgattacttctacgcgataaatgtgctaaagtaatctcacgagatccatttacaattaaattattaataggagttccaggttatacacaaccattagtgttaggtattgatcctggatcaaaatatataggttcagcagttcgaaccaagaaaaaccaagcaatttatttatcagagattcatcaacgtacagatgttactgataagatgaagcaaagaaagatgtatagaagaactagacgcggaagaaaaactcgatatcgaaaaccaagatttcttaatcgaaagaatagcacaaagactaatcgttatccaccaacacttgaaaacaagtttcacactattcagaaagaagttgagtttgtaactaagatacttccaatcaccaaaatgtacatcgagatgggaaagtttgacatgcacgcaatgatgaacccagctgtattaaatcatcactggatgtatcaacaaggtaacgaatttggtttctacaacaccaaagcttatgttttgaatcgagatgattatacatgtcagtgttgtaagggaaagagaaaagaccctcatttacattgtcaccacataatctatcgaagaaatggtggtagtgatagagctgataacttgttagttgtttgtgaaacttgtcacgatgatattcacgctaacaagatt

SEQ ID NO: 1518 - DNA, 278 bp, Unknown
  Ga0268283_1011674 JGI
gtggactacccaggaggcgttagctcccggacttcagagtaatctgaagcctaagatcaccagactcagtatctagaaacggatactacgatatctatgatgtagatacctgcgagtgccgcctcagctcgctgctctatcgtggctttgtaaacatcctgaggaaacggaagtcaaaccactttacgaagcatagatatcattgtcgagaggaagttggaaagtctactggtaataggtagacgctacacattactctgaaaggagacataaatttg

SEQ ID NO: 1519 - DNA, 1257 bp, uncultured Methanobrevibacter sp.
atgttcgtttatgtactaaacatgcatggtgaaccgttaatgccatgtaaaccaagaaaagcaagaaaattactgaaagaaaagaaagcaaaagtggtgaacaggacaccatttaccatacaattgttgtatggatcttctggttataaacaaacggttaatctgggtgttgatgccggaagcaaatacattggattatcagcaaccaccaataaaaaagaattatttaaagcaacagttgaattaagacaagacatacctaaattgttagaaagtagaaaaactcagcgcaagaatcgcaggagcaaattacgttatcgtccggcacggtttaataatcgtggtaaaaaaggaaaactggcacccagtattcagcataaaattgacagccatttaacaataattaaacgtatttgcaatataattcccatagaaaacatcattgttgaaactgctgaatttgacatgcataaactaaagaacccaagtgtatctggtgcggattatcagcatggcgatgcagaaggtttttataatgttaaatcagctgttttaagccgtgacaattacacctgccaaatatgcggagcaaaaaataccaaactgcaagttcatcatatcagattcagaagtgatggcggttccaatcgcatggacaatctagtaacattatgcaaagaatgccatgataaagtacatacaggcgaattgaaatatacaaaaaaagtcaaatcattcaaacattccagtcatatgaacatcatgagaaaaaaattaatacaatctttaaaaaaagaattcagaaatgtttttgagactttcggttatttaaccaagtatactcgtgaaaaattgggccttgttaagtctcattgcaatgatgcttttgtaattagtcacaatttggatgccgaacaatcgaatgttgaatattcatataagaaagttagacgacataatcgccaaatacataaattcaaacctagtaaaggtggaaaacgtcaacgcaatcagtcaccatatattgtaaatggttttagaagatatgataaagtaatgtacaacggtaagggatgttttataacaagtaagcgtagcagcggttattttcagttaaaaacatttgatggaactgtaattagccaaggagtaagtagtaagcggttgaaattattagaacctattaaaggttggttaatagattggaggttggcaattcctccccgacctaaagaggtcggggtatccttgccataa

SEQ ID NO: 1520 - DNA, 272 bp, uncultured Methanobrevibacter sp.
gttgattaaactaccacggcttgtagaagccgtggatttctagagtcttttctaggaatccactagtttaatagactcagaccattaattggtctacgttactcaagaatattaggtaccgtggaatgtttaatcccagttccacgctctacggtaagtgattaaacaggttctgagatggtaggaacagtgttgcttacaattttaaaccttgggataacattgtcgagggataaaataactcaggaataggaggtaaacgtttaatgttc

SEQ ID NO: 1521 - DNA, 1026 bp, Unknown
  Ga0401685_0570 JGI
ttgaaagttccagttttagaccgcaataaaaagccgttaatgccttgctcacctaaaagagcgagaaaattgatggaaagaggtgaagccaaaccttactggtctcgcggagttttctgcattattttgcaaaaagagccgagcggtcgagccaagcaaaaaatcgtagtaggcgtggatagcggttccaaaatggaaggctataccgttaagtccaagaaggacacgtttttgaacatccaatcagaagcggtcacttgggtaaagcgaaaggttaaaactaggcgagaagctaggcgaactcggagaactcgaaacaatccatatcgggctaataaatccaaccgggcttgcctgagaaaaaaccgaataccgccggcaacaaaggctcgttggggtttgaaactgcgagtgttaaattggctaagcaaactttatccgatttcgcacgtcgttgttgaggatgtgaaagcggtaacaaagtctggcaaacgtgcgtggaataaaagttttagtccgctacaagcaggcaaggcttggttttaccaacaaataaaaaatacgaaactcaaatcaaaactcaagctgaaactcgttagcggattttacacgtcgaagttgagaactcggtacggtctgcacaaaagcaaaagcaaaatggatgtgaactttaatacgcattgcgtagactcttgggttatggcagacaattgctttaaaggcagacgggttgttgacaatagcagagttctgtttattcagccgttaaactttgctcgcagacaactgcataagttcaatgctaaaaagggtgtgcgggctaattacggaggaacgcgaagtttggggctgaaccgaggagcgttagtcaaacatgtaaaacacggcttatgtttagttggcggaacctcaaaggggaaaatttcgctacacgcagccgacacttacgaaagattgtaccgaaatgcaaatacggctgactgcgaactgcgaacaaactttcgctgggcggtccagtgggcttga

SEQ ID NO: 1522 - DNA, 224 bp, Unknown
  Ga0401685_0570 JGI
gccaatgggcttgtgaaagaagaaaccaacttctgaagcaattaaaaagtacgactaccctacggcactcgcagaaatgcgagaggccaaacttagcagcagcggcgtggtagccgcaagagtacggtaaaaatgttctgctagtttttaccctctacggctgaaagtggggaagcagtattaaaacttggcgggtaaccgctaaaacaaaagggagaagtgag

SEQ ID NO: 1523 - DNA, 495 bp, Unknown
  Ga0400245_005261 JGI
atgtcggtcttcgtgttggatagacgcaagcacccccttatgccgtgcaccgaaaggcgtgcgcggcttttgctcggccgtggtcgggctgtggtggtgcgtgcgtatccgtttacgatccggctgaaagactgtgccggtggcatcacacagccggtccgtatcaagatcgattccggcagcaaaaccaccgggatcgcgatggttcgagaaaacggccagaagcaacacgttctggccttggcgatcaaagccaccgggcgcggccgctataagcgcacacgcttaacaaagcacggtttccctcgtagctatctgatgcgccagaagaaagttcaagggtttcagaccggtgacatggtgcgagccagatgccgacaggcacgaaagccgacatctggccgggccgggtcgccgttcgcaagaccggcagcttcaacatccagacaccgggcggcgccatacaaggcatcttatatcggtatttcacattaa

SEQ ID NO: 1524 - DNA, 295 bp, Unknown
  Ga0400245_005261 JGI
gtcaactaccccgccctgaaggacggggcttgtagaaaacaccctgcaagccaggttgaccagggaaagcggacaccaacccgcaccgtttatcacaggtcgctaagactcaacgccgaacgcttcctcagttcggcgctctgaaaggctgggatcacgctggcgaaaggcaaagcaccgaaggttccggtcaccacgcaagtaggagccggtgatagacattcccgagggaagagaggcttcggcctccgtcacaaggcccgtaagggcattcattgaaaggaaaacgatgtcg

SEQ ID NO: 1525 - DNA, 411 bp, Unknown
  Ga0394872_0000490 JGI
atgttaagagtacccgtattagacaaaaacaaccgacctttaatgccgactcttgccagtcgcgctagacgttggctcaaagaaggcaaagccatcggcaagttcaacaaattaggacaattttatgttcaactccaagaacatcctagtaacaacaaaactcaaccaatcgctattggtattgatcccggtaaactgttctcagggattggggttcaatcagctcttcataccttagcaggtattacttacacaggctggtgttctggagatactgcattccaagtatctgtttccgattttaattggaaacggctgggacaatttactgcctcaaaagtggagttgctccaacgctccacaggactaatttgtaaacaggaaacagtattcgttggagcaactggttaa

SEQ ID NO: 1526 - DNA, 219 bp, Unknown
  Ga0394872_0000490 JGI
aacgttaattgaaagccattgaaattcatttcaaggcggtttatctggttggtgcaagatctcagtattagcctaatcttggaacaaacctccagatacttctctagtctggaatcactttaagttcttttgggagaacgttgtcagacaagacatcttagattaggtgggcgaagagactaaaactatttactcgataggattatatctatgttaaga

SEQ ID NO: 1527 - DNA, 1233 bp, Human gut metagenome
ttgagagtatttgttttgaacaaacgcggaaagccgctgatgccttgttctccggcaaaagcgcgccttctgcttaaagagaagaaagctattgtggtaaggcgcacgcctttcaccattcagctcacgattgcgaccggcgagtccaaacagccggtgagtctgggtgttgatgccgggtacaaacatgtcggactttccgcatcaactgaaaaggctgaactttatgcatccgaagtcgaactgcggaaggacatcaccgatctgctctctgctcgtcgtgcgttacggcaatcccgccgtaaccgcaaaacgcgctaccgcgcaccgaggttcgacaaccgcatccgcaccaagcgcaaaggctggcttgcaccgtcggttgaaaaccgaatcaacgcgcatttgtcgcgcatagaagcggttctccgactgctgccgatcacgaagattaccgtggaaacggcgtccttcgacatgcagcggctgaagaatcccgacatttcaggaaaagagtaccaagaaggtgaacagctcggcttttggaacgtccgcgagtatgttctttttagagatgggcacgtctgtcggcattgtcacggcagatcgaaagacccggtgcttaatgttcatcacttggagagcagacgtaccggcagcgattcgcccgacaacctgattacgctttgtgagacgtgccataaggcgcttcaccgcggcgaaatcacgctgaaggccaagcgaggacaatcgttccgggcgcaagctttcatgggaattatgcgccgggaggttttgaaccgcctaaaggcgtcgtatcctgagctgaaggtgcacgaaacctacggctacttaaccaagcacgcgcggattgcgaacggcattgtcaagtcacatggtgcagatgctttctgtattgccggcaaccttggagccgaaagctcggcgaattcttcttccagaagcagactcgccgaaacaaccggcagattcacaaactttccatcctcaaagggggcattcgaaagcgcaatcaggcaccctttgaggccaaaggcttccgtctttttgataaggttgcctgccagggagaagaaggcttcattttcggccgtcgatcatccgggtcttttgatgtacgaaagctcgacggcacccgcatttcagccggcatcagctgcaagaagctgcgtctgctggaaaagagacgaacctatttaacagaaattcgaa

SEQ ID NO: 1528 - DNA, 247 bp, Human gut metagenome
gtcaactacctcggcctaaaggccggggcttgaaatagcctctagttgactagcctcaggccgtcatttggcggactacgttggttgagaatatataggcaccgcgggatgtagatactagtcccgcgctctgcggccgatggttaaaagctctgagaggtaggagcggtgctgtcggcttgaaaccccctccaacattggcgaaggatcacaaccggtcgaaagaccgaggagacaaaacttgaga

SEQ ID NO: 1529 - DNA, 1338 bp, Unknown
  LHMISPF_alex1_c86 JGI
atgagcaaaatattcgttgtagacaccaacaaaaatcctctaaatcctatccatccaggccgagccaggatgctgcttcaagagggcaaagccgctgtctggaaacgttacccgttcaccatcatcctgaaagatgttctaccaaatccccaaattgcacccttgcgattaaaaatagatccaggcgctaaatttactggcttagcactggtagatgatgcaacaggagaagtagcttgggccgccgaactagaacatagaggctttcaaattcgcgatgctttaaccaaacgccgccagttaagaagaggaagacgccatcgaaaaactcggtatcgtcaaccacgctttgataaccggaaacgccctacagggtggctcccacccagtctgcaaagccgagttgagaatatcgtaacttgggttcgtaggttacaaaagctagctttgatttctgatatttctcaggaattagtcaagtttgatactcaactcatggagaatccagacatcagtggattcgcataccaacaaggtgagttagctggttacgaagtgcgagaatttctgcttttcaaattcaatcatacctgtatgtactgtggggctaaagatactcgtttggagattgagcatcttttacccaagtctaaaggtggttcaaatagaattagtaatttaggcattgcttgtaggaattgcaaccaaaaaaaaggccgtcaagctctcagagaatttttagcccaaaaacctgacttgttacagcgcattctgagacaagtaaaacaacagaaagccgacactgctgccgttaattctacccgttgggcattatttaatcgactcaaagagactggattatccgtggaagttgggactggtgggcggacaaagtttaaccgatgtcgtcaaaacctacctaaaactcactggctggatgctgcctgtgttggggcatctacacccctcaaactaaaagtttcaggggtagtgccgctgtcaataagggctgttggttatggaaatcgtcaaatgtgtcaagttgacaaatttggctttcctaagcgtggtaaggaaggtaagctaatcaaacgtgagcgacagaaaaattactttggttttcaaacgggcgacatggttaaagctattgttcctactgggaaacacgctggtactcacgttggtaaagtcaccgtcagaaaatccggtgcatttgatttgactgtggctcatgtgcgcttgcagagtattcgttggaagcactgccgcgcggttcaccgctttgatggttacagttatgcctctttgtccaccaatgtcgagtttttaaacgattag

SEQ ID NO: 1530 - DNA, 249 bp, Unknown
  LHMISPF_alex1_c86 JGI
gctatccgcgaaccactggacaaacctggacaatcccgataaatccttggtagagatagcccggttaagtctaaccacagactacgttaagaaggtcacgacaccctgtgagtgcttgccagctccttgctctgtcgctaccagttaaacatctttatttcgctaaggaagtgctgctagcatgacaagccctcttaacattaccaaggcaaaagtcacccgattattcggaggctcaatatgagcaaa

SEQ ID NO: 1531 - DNA, 1350 bp, Unknown
  Ga0172362_10014068 | JGI
atgcagaagttagaaaaaagagatacatacacacctacgaatacttctctagttcgtagcaactgtgattctgtgattaaacatggtcaattcgaccaagtgttgcagaatttaaaaactttttctaacaactccgaagagaaccaacagtctggcaagactgaacaggacttgcgagttcctgttttaaacatgcgtggacatcctttgatgcctacaaatccaagaaaagcaagaaagttgttagaacaaaacaaagctaaagtagtaacaataaaaccatttacgatacaactaaattatgctacaggagaaacaaaacagaatattatattaggcattgatgcaggatacaaaaaagttggtttttctgcaagaaccagcaaaaaggaacttatatctggagaagttgaattgagaacagatatacctaaaaaactacaagaaagggcaatgtatcgcagaaaccgaaaaaatcgtctttggtataggcaactacgatttaacaatcgtggacgaaacaacggatggcttgcaccaagtatacaacataagcttgatagtcatcttagaattgttgaaaaaattaaacaacttcttcctatcacacagattgtagtggaagttgcaagttttgatatacagaaaatcaaaaacccagaaacgcaaggtgagcaatatcaacagggtgaacaacttggtttctggaatgttcgtgaatatgttcttcatcgggataaccatttgtgtcagcattgtcatggtaaaaagaatgaccccttgttgcatgtgcatcatatcaacggtaaaaaagaaggtgctacagaccgtccagaagaacttttaacagtatgcaagacctgtcatgatgagcatcataaaggcattgatattatccctaaaaagataatcaagaatttcaagcctgaaacttttatgacaaccgttagatggaaaatagtcaacgctctaggttgtgagcatacttatgggcatatcacaaaaaacaacagaattaaagcaggtttgcctaaatcacatatcaatgatgcttttgttattgctggtgggactgaccagcaacgttgtaaaccgattgtttcaaaacagataaggcgtaacaatcgttcaatacagattaatcgtaagggattcaagccatctattcgcagacagaaatacaaacttcaaccaaacgatatagtcaaatatttggggaaggaatgcaaggtaaaagccatattcaacaaaggtaattggattaggattgttgatggtattgaaactattattaattcgaacattaaaaatgtagagttgttatattatggaaaaggaatatttaattag

SEQ ID NO: 1532 - DNA, 256 bp, Unknown
  Ga0172362_10014068 | JGI
gtcaactaccacccactgaagtaggtggcttgtcccgtaagggatgacgtaagagttgattaggaggcatagaaaaatatgcagaagttagaaaaaagagatacatacacacctacgaatacttctctagttcgtagcaactgtgattctgtgattaaacatggtcaattcgaccaagtgttgcagaatttaaaaactttttctaacaactccgaagagaaccaacagtctggcaagactgaacaggacttgcgag

SEQ ID NO: 1533 - DNA, 828 bp, Unknown
  Ga0134404_104661 JGI
  MISC_FEATURE (385)..(394): Any "n" represents any nucleotide
atgagcacttgcgcttgtgttctcagtaagaatggcgaacgcctgatgccgactatccgtcttggcaaggtacgccatcttctgaaagacggaaaagcaaaaatcattaagcatcatccatttactattcagttactgtatgacagcgaaacgaatattcaacccattgaaatctgtgaggacgtcggttacaactacatcggcatcagtgtgaaaagccaatctcacgagtatgtatctgcacagtatgatacattgcaagacgagaaaagctgtcacgatgcttgccgtagaatgcgccgaactcgcagaaacaggctacgttaccgccaaaagcgctttgacaaccgcaaacgtgacaaaggctggcttgcaccctctcttnnnnnnnnnngcgaagttgtgcctattacgcatgcaaccgttgaagttggttctttcgacacaatgcttgtaaaagcaatcgaggaaggtaaagctacaccagaaggcgcagattatcaaaaaggccctcgctacaatttagcaaccttgcgggaagcagtattctaccgtgataactacacctgccaagtttgtgggcgcgaagccagtgaaggtgcaattttgcacgtgcatcacatgttttattggaaaggtcgccatgacaatagtctcagcgagcttataacagtatgcgagaagtgccatacaccagctaaccatcaaaaaggcggcaagctctatggattcggtgaagatataaagtttgccaacctttctggtgcagcatttatgaacactgtacgctggcaaatcgttaatgaactttacgctgcttttggaaag

SEQ ID NO: 1534 - DNA, 326 bp, Unknown
  Ga0134404_104661 JGI
gtcaacaaccccgccttaaccagtccgctggttatagatggggcttgcagggcaacccgtaagcccggttgattagcctaagtctgctgctccagcggcaggaaactacgttgtgtactaataatataggcaccttactcatgctccacaagtggtaagcactgcggacggctcgttaaacatctctaagggtaggagaagtgcgaacgtcatgtcgaaaggctaaaacggtataacaacattggcgatgtggaccacagggcgcaagccctgacttatcgatttacaactattatacgaaaggagtaccttgcatgagcacttgc

SEQ ID NO: 1535 - DNA, 669 bp, Unknown
  Ga0123338_10030355 JGI
gtgatcctcaaaggacaaatcgaacatagaaacgatgttaaaaaactgatgacgctaaggcgtggcaataggtcttataaaaggtatcacaaaaggtatagaatttgcaggtttgacaatcgcgcatcgtctaaaagaaaaggaaggattgccccaagcattaaacagaaaaaagattcggttcttagggcaatcaatcagttgagtaaacggattagaattaaagaattttggttagaagatgtcatgatagatattcgtgcatcaacagacggatatgaatcgtattcgtggcaatatcaaaaatccaacagacttgatgagaacttacgaaaagcggttatccttagggataaactcaagtgcgcagagtgcggaaagacaaacaccgttttagaggttcatcatataaaggctaaaagatgtaatggctcaaacaccttgggcaatttaatcgcattatgttctagttgtcatcaagaaacagcaggcagagaaaaagagtttgaggaaaaatactttaagctgatcaatggcaaaaatgtaaggcttgacgatgcacaacatgttatgcaggggaaaagctatctcagacatcaattatcaatgctggggcaattaagcattacaaatggtggcgatactgcaaacaagcgaatagattggagt

SEQ ID NO: 1536 - DNA, 499 bp, Unknown
  Ga0123338_10030355 JGI
tagaaaaatatgtacaatagtggacacataggcctattgcacgtagactgttgagcaggtctcaagtcttagtgactgctacagtcgaaagatgtgttgcagatatgaactacgttggatagtaaggtaaagacacacctttggatgtaatcgtcagtctaaagctctgtgagtgccaaccaagaaactgcgctaatgccatgcgtagataacagggaaacacaagtcctctatctgacattgacaagacgaaaaatactccgaaaagatggcttatcagaaatgatactagagaaagaatattcattcgtcatagtcagcgaagggaaaaagttaactcctaccccaataaacaacgcatggtttttgatcagaaaaggcaaggctaaattagtgagcaaatatccaatggcaattcagttgttaagatccattgaaaaagaggatgttgacaagtcagctattttgtgtggaattgacgatgggtctaaacacgttg

SEQ ID NO: 1537 - DNA, 567 bp, Unknown
  GENOME_ACESSION: mgm4743570.3 MG-RAST
atgacacgaagagcaaaatatcgcaggaacagaagaaatcgtaaaactcgctacagaaaggaaagatggttaaatcgtgccaactctattaaaaatggcaggtttagtcctacgatgcggagtaaacttcacagccatataaaagaaatagagtatattaaatctattcttccaattacagaaatggtatttgaggcaggtcagtttgacactcaccttatgaaaaatccaagccttgctaatctcaaagttaaacattggggctatcaaaaaggtgctaattacggatttgagaatactaaggcaatagttcttaatcgagataactatacttgtcaatactgtaaaggcaaacataaagacagtaagttagaagtacatcatattgtatttcgcagtcagggcggttctgatgaagaaggcaatctaattactttatgtcatacttgccataaaaacttgcatagtggaaaaattaacctcaaattgagtggcaaaattaagggaacccttaaatatgctacgcagatgaactctattcgtaagcaactttttagactatatcca

SEQ ID NO: 1538 - DNA, 312 bp, Unknown
  GENOME_ACESSION: mgm4743570.3 MG-RAST
gtgaactacccaccacctaaaggcagtgggcttctgttaaatggttcaccagactaagttgttagaaatagcaactacgatatttaggtcaagatacccttggttgacgcaacagaccatcgctctatcgtacatatttaagttaggtcagagtaagaacagccttgtgatatgtgcttaaaaagcctttatatcattgtcgagttgaagtcggaacaactgcatggtaacagtgtagcaaagtacgcacaaccattgcataagtaatggcattatgtgattaagttcacaggaaaggagcacctgttatgg

SEQ ID NO: 1539 - DNA, 1065 bp, Unknown
  Ga0114919_10008950 JGI
atgcaaatgcaacaacagaagttattgagaagaaatacatacacaccattgaatgcttcacaagttcaatgcaactgtgatttggcattaaacaaagaggaaactcttagtgtgtcaaatttaaaaactctcaataacaatcccgaagtgaatctaccgcagaatacagcgggtcttaaagacatttatgtattcattaaatcaattgacggtaaagctttaatgccgtgtaaaccagcgaaagccaaacatttattaaaagaaggaaatgctaaagtaattaaacgtgccccatttaccattcaattaacgtttgaatgtaaaaataaaatacaagacattacgttaggaattgattccggatatcaaaatattggattttcagcagtttcgaatttgaaagaattaatatctggaacagttaaacttgataacaaaacaaaagaaagactcgacacaaaaagaatgtatagaagaaataaaagaaataagttgtggtatagacaatccagatttttgaatcgttttatacctgaaggatggttaccaccatctatagagcgtagatataaaactcatttaaatttaattgaacgtttaaaaaacattttacctattaataaagtaataattgaagtaggtaagttcgatattcaaaaacttgagaatccagatattaaaggcgttagttatcaacaaggagaaatgtaccaatatcgaaatagaattggatatttactttcaagagaacatggagtatgtcaatattgtaaaaaacaaggtgggggaaactggcgattacatcatattttgggcaaagaaaaagatagacctaaggattgggctttattacatgaaaaatgtcatcaactcttacatattaaaaaacaagaaaacattttaagaaaacaaaaatctaaaagttataaagactcaacatttatgaacataatacgtaaaaaattcaaacaagatataaagtgtgaattaacttatggttattatacttttcaaaatagatgtaatttaaatttagacaaaagtcatgttaatgatgcatttgtt

SEQ ID NO: 1540 - DNA, 264 bp, Unknown
  Ga0114919_10008950 JGI
gtcaactaccactgagctaaagactcagtggcttgcaatgtgaattgcaacgcaagagttgattagggagttgaaaaatgcaaatgcaacaacagaagttattgagaagaaatacatacacaccattgaatgcttcacaagttcaatgcaactgtgatttggcattaaacaaagaggaaactcttagtgtgtcaaatttaaaaactctcaataacaatcccgaagtgaatctaccgcagaatacagcgggtcttaaagacattt

SEQ ID NO: 1541 - DNA, 1287 bp, Bioreactor metagenome
atgcaaagagttttagttttaagccaagataaaaagccattaatgccttgcttacctgcccgagctagaaaacttttaaataaatgcaaggcaaaagtatatcgttattatccattttgtattatattgcaacatcgtatagatggcgatatacaaccaatatcattgaaattcgatccgggtagtaagacaacaggagttgccctcgttggcttattcccaaaagggaatatctgtttatggggagctaatctaacacatcgtggctacgcaatcacaaaatctttgttatccagaaaagcaattcgtcgtggccgcagaaatcgaaacactagatatcgcccgccacgttttttgaatcgaaatattcctaaaggttggcttccgccatcgttacgttctcgaatttttaatatttatacgtggtgcaaaaagctcaagcaatttgcaccaatccaacaaatcgaaatagagagcgtcaaatttgatacccaaaaactgcagaatgctgaaatatctggtatagagtaccaacaaggtactctgcaaggatacgaaattcgcgagtatttgctagaaaaattcgggcatcagtgtgtatattgtggcaagtctgatgtaccattagaaatagaacatgtagtatgtcgtcataatggtggcagtgatcggattagcaacttagttatatcatgccgtatgtgtaacgaaaagaaaggtactcaagacatcagaatatttttaaaaaccaagcccgctctattgcaaaagatacaaagccaattacaagtcgcactcaaagacacagccgcagtaaatgccactcgatatgcaattttagacgcactgcaacaatttcaactaccaattcaatatggcactggtggccaaactaaatataatcgcacgacacaaggctatgcgaaagatcattggattgacgcggcgtgtgttggcgtaagtggttttaaagtaaaaattccccctaaaatgcacatattaaatatcaaggcagtaggacgcggtactcgccagatgtgtttaacagataagtacggtttcccgcgaacaggcccgaagcaaaagaaacggatatacggctttcaaactggggatatagtatatgctaaagtaccaaagggcaaaaaagccggggaatatataggccgagttgctattcgtagcaaagggtattttgatattcggacacacactgctctcataagtagcatttcatatcgttattttattctcctccaacgaagcgatgggtatcaatatgattag

SEQ ID NO: 1542 - DNA, 331 bp, Bioreactor metagenome
ctctacaagcccacctcaaaaaggcgaagtttgttagagaaatctggcgaatttcacgttgaccacgcctaagcctcaggtaacgaaagaggctacgttacgcacgaatccaagtaattggtgtaataggcacgtcaggatgcttcacttggtacgctaagtgctttactccagtcctgacctctgcggcaatccattaaacaggtgtaagtggtttaggccagtgtggattgcaaaaaccgtgtttcaagtaacattggcaaggagagcttaacctgcgcaagcagagttggtacgtaagtaccttcctgaaagggattttatgcaaaga

SEQ ID NO: 1543 - DNA, 897 bp, Unknown
  Ga0070707_100019090 JGI
atgatgtttgtctatgttcgcaatcaggacagcacaccgatgatgccttgcacgccagcgaaagcccgcaagctcttgcaggcaggcaaggcgaaggtgatgaatcgctgtcccttcacgattcaactcacctggctgtgtgagggacacgttcaagagatcacactcggcatcgataagggcagttctatcacaggactttgctgtgttggcaataggaacgtcctgttctcagcagagatccaccatcgccgagatgtcaaagacaaaatggatgaccgccgtgatcggcgcaagagtcgtcgagggcgcaagtggtaccgccctgcgcgattcaagaatcgcgcatcaagcaggcggagtgggcgattgcctccctcgatcaaaacgaatgtcgaggaggtcattcgggtagtgaagcagatcccgttgccgatttcttcgctggtcatcgaggacgttcaggtagaccttgctcgcttgaatgaccccacgcttcaaggcagtcgataccaagatcccacgcgactcgatgagaatctgcgcatggcctgtttgatgcgcgacggctacgcctgccagtactgcggcaagcaaaaggttcggttagaagctcatcatctggtgtacagggaacaaggcggaaaagatacgctgacgaacttgctcaccctgtgccaagcatgtcataaaaaggttcaccaggggaaaatccggcttgagggagtgggagtcagtggacacctggaccagattgcgcagcgcacgatgcagggcaaaagctacttgtatgcgacgctgggcgcacatacccccttgagcacgctctttggataccagacggccaccctgcgccaaaccagagggtggccgaaaacgcacctcgccgatgccctc

SEQ ID NO: 1544 - DNA, 239 bp, Unknown
  Ga0070707_100019090 JGI
gaaaatagttcctaaaaaggagagcgtttgagagcgctggactcatggagctaccagcgggccagcaatggcagcagttccttgagagatcacaccttccgatgttcgctccagtcggaagctctgtgggcagatattaagggtaagcgaaagccgaaggtgtatctgctgggaaaacctcctggaacagtcgcgaggagcaatttactccgcagggagggcctaaagccatgatgttt

SEQ ID NO: 1545 - DNA, 1248 bp, Unknown
  Ga0187899_10002485 JGI
atgacgacctttgtcatctcggcagagggcgaaaagctgatgccgacgacaaacatcaggaagataagaaagctcctccgctccggaagagcaaagatcgtgaagaacgcgccgttcaccgtacagcttctgtacgagagcggaaacgctgtgcagcctatcgaatttacagaggataccggctatcagtatatcggagcctctctcaagtcggagaaacacgaatacgtaagcgccgagtatacgcttcttaaaaacgagaagcagcatcacgatgaccagcgccgcgaggtgagacgtcctcggcgaaacagaaagcgctatcgcaaggcgcgctttgataacaggagaagacctgaaagctggctcgcgccgtcgctcagaaacaaggcggaccgccacgttgacatcttcaggatgtattatgcggtatgcccaataatgagcgtctcgctggagatgggccagttcgatccggcggtccttgacgctatcgagcaggggaagcctgtacctgagggagctgattaccagtatggccctcgctacggctatgacacactgagagaagcagtcttcacaagagacggctacagatgcctttgctgcggtaagtcggctatagacgacggagtcatacttcgcatacatcacgtaggcttccgcacgggcgacagatccaacaggcttagcaatctcgcatcagtatgcgagaagtgccacagtccgaagaaccataagccgggcggaaagctctgggatctgaagccgcctaaaggtacggcatccgcagcgtatatgaacaccgtaaagtggcatattctcgaagagataaaggccttcggtatagagacccatatcacctacggtgccgtgacgaagcgcacgagacttgatctcaatatcggaaagtctcacgcaaacgatgcctattgtatcggcaatatgagaccgaaacaccgcacaaggacgcagtgcgttgagaagcgccgccgcaacaaccgcatacttgagaagttctacgatgcgaagtatgtggatgtacgtgacgacaaagcgaagaaggcggcggagctcggatgtaaccgcacgtcgagatccataccgcgaaacaaccctcagaacgagcgcaccttccgcgggaagaagatatccaaaggcaggcgcagtatccgcatgcagagatatttgtatcagccaggcgatattgtcatcttcggtggagagaagcgcatggtcaagggcact

SEQ ID NO: 1546 - DNA, 348 bp, Unknown
  Ga0187899_10002485 JGI
atcaaccacccaccgcttaggctaacgccttgaagcgggggcttgtgaaaacacaagtcagttgattagcctaagtgcttcgagcactacgttatccgcgaatggctgcgaccaaataggtacgtcaggatactccacaagttctgacctctacggatatgcgttaaacatcggtgagggtagccgaagtgcgtatatcatcaaaccgcggaataacattggcgatgtggacaccgccctacggggcgaggatccgcatacacgcctctacggaaaaacggtatgcggaagccgtaaggcaaagtacgttagagcaaaagtaagaagagaaaggaggagcgtatgacg

SEQ ID NO: 1547 - DNA, 1038 bp, Unknown
  Ga0394882_0012572 JGI
atgattaaaaaaccaaactatgtgttagttttagatgctaacaaaaacccattaattccgtgtaaaccatcgctagctaaaaaattattaaaagctcaaaaagctgccgtttaccgaagatttccttttacgcttattctgaaaaaagaatgtactgtaaatcagcaaaaactagaatctcgtcgtcagtatcgtcgcttaagacgaagtagattgaggtatagaaaaccaagatttgacaatcgccaaagagctaaagattggttagctcctagtttagagcatagggttttaactacgatgaccattgtgagacgactaattaaattcgctcatattagttcgatcgttatggagttggtaaagtttgatacccaaaagctagaaaaaccagaaattttaggaattgaatatcaacaaggagaattattaggctatgaaattagagaatatctattagaaaaatgggagagaaaatgtacttattgttctcaaaaggatattcctttgcaaatagagcatattgttccaaagtcgagaaacggttcaaacagacttagtaatttatgcctagcttgcgaaaaatgcaatcgaagaaaaggagttaaatcgatcgagcaatttttagccaaaaaccctagcttacttaagtctattttagttcaagctaaaaaaccattacacgatgctgctgcgattaatgccactagatggaaattgtttaatactctgaaagaaactggtttaacaattttaactggaacgggaggacaaactaaatttaatcgttctcagtttggtttagaaaaaaaccatttttatgatgctgcttgtgttggaaaaatggataaattagaaatttttgccaaccaacctttgattattatttgcaaaggacaagggggaagacagaaagcagcattaaataaatacggatatcccattagatacaacatctttggacaaaaagcaaaaagcattcacgtcaataaattaagacgagtccatcaaaaggatggatatagttatgcacaataa

SEQ ID NO: 1548 - DNA, 267 bp, Unknown
  Ga0394882_0012572 JGI
ctaaaaaacctatacaaacctaattaaggttggtattttgttggaggttgcagactaagttatcacgtaaggtaactacgatagtcaagtcatgatacctacaaatgaacgccagtttgtagctctatcgctagaaattaaggaacgggtcaaaaggtttatatccaagcgtgtttctagcttaaaaagcttgcattatcattgtcgaggctaacttaacctattaactaggaactaatcaaaaccatgattaaaaaaccaaactat

SEQ ID NO: 1549 - DNA, 861 bp, Human gut metagenome
atgtatgtattcgtcatagggctggatggaacaaggcttatgccttgtaaaccaaggaaagcccggaaattaatagaagctcacaaagctgaaatctataagaagcagccatttacaataagattgttgtataagacaggctgtgctacacaacccgtaacaataggtatagatacaggttcccagcatatcggaattgcggtaacatcaggaaacaaagtcttgtaccaggcagagatagaattgcgcagcactatggacaagcgttcgctcatggaaactagacgcagttaccgcagaagcagaagataccgcaaaaccaggtacagaagtcctaaattcagatttcatacaaaacggacatactctgaaacacttgttaaacgtaagactacaggtgttatgacccactgggttaaacatactaactcaatgagtacaaacagaccggacggatggcttgcaccatccatgcagtcgaaagcagatcatcatatccgatggattaacagatttttagatgtacttccaccagatacgaaacttcggttggaaattgccagattcgatatagcaaggatgaaaaatccggaagtgcatagtgaattataccagtatggtccacagtatgattacgaaaatttaaaggcttatgtatttgacagagaccattacaaatgtgtggtctgtaagaggaaattggggagtaaacagccggatggacattctttaaaaggaatgatgcatcacataacattccggtctaaaggagctacggacaatcctgatcagcttgttacagtctgcgaatactgccatactcctcaggcgcataaaaaaggcggagtactctgggatctg

SEQ ID NO: 1550 - DNA, 224 bp, Human gut metagenome
ttaaataatcgagcatggttaaatgattgtcgcccgtaagggcaggatgactagcctaagttccaagagaactacatcagaagtacaatcccagttccagacagtaccctaatctgagcgctgggcgggcaacatatgaatccaggagaaagaatgatgtggcccggtgttacaagtactctgatattggcgaagggtaattgctgactttggccagcatagac

SEQ ID NO: 1551 - DNA, 1509 bp, Human gut metagenome
gtggggacgacgacctggtgctccaagcgcaccggacacaggcgaggggcgaactaccccgtaaggggtcccggggcttttcagtccccgggaaaggaggaaataatgaaggtttttgtcattggcatgactgggaaaaggctctgcccaacttccccgtctaaagctaaaaaactgctgaaaacagggaaagcacatgtttacaggcgtgtgccgttcacgatccggcttgattataagaccggaggctccgcaccgccgctgaaactggggatcgatacaggggagcagcatatcggtacagcagtatgtaacgatgccacagtcttctgtaaatcagaaattgaacttataaaatccatggaaaagaagaaaaggctggaaaaacgcaaaatataccgcaggtcccgcaggtacaggaagacccggtacaggcatccgaaattccgtttccggacaaagcggatttatgtggaaggcgggtacaggaaacggaaaggcgggaagatggtgctccggcattggaagaaagtcccaaacacggtcatgacgaaccggcatgaaggatggctcccgccgtctatcgagtccaaggtaaagcaccatatcgactggatcaaccggtatatggatgtgctccctgacgggaccatgctcggcatagaagtagcccggttcgatattgccaggatgaaagacccgtctatccgcggagaactttaccagttcgggcggatgtatggccgggaaaatacgaaggcgtatgtactggcaaagtttgattatacctgcccgatctgtaaaaagaagtttgacagggacaggaagccgcgtatgcaccatgtcaccatgcggaagaacgcagccactgacaacccggatgagtatgcaccagtatgtgtgctctgccattccggggaggagcatctgccagggggtgtgctggataagctggcaaaggaatgcagacgcagggaataccgtgaacctacgttcatgaacatccttcgccgccggctgtttgagacttacccggaagcggaattcacatacgggaatatcacaaatgctgaccggaagatgctggggctggaaaaaacccacgcgaatgatgcggtctccattgccatgcatggggcgaaaaaagtaatagactgcgaagatacggtctattaccgccaggttcacaggaagaaacggtcccttcataaagcaaccccgcgcaaagggaagaaagagccgaaccataccgcaaagcggaacgtgaagaacgtcccttatgtaggcaagttccacatcaatgataaagtgaaaggtccagacggaaatatcggattcataaccggtttgacaggaagtgcggcctatatcacggatttcatcggggaatacatctatccggaagggaaggattacaaacaacatacgctttccagcctgcggtacgtccatcattgtgggaattggatcaccagctccgtatcaggtgcggctgtatctcacgactaa

SEQ ID NO: 1552 - DNA, 337 bp, Human gut metagenome
gtcaataactcatgactgaagtcacgagcttggaacagcttccaaggcttcctgttagccgtacatgaaacggcagttgactagccttgtccttttccctgcaccgcagggggaagggcagtcctgatgcgttaataccgccgcagacagaaaaagccctgcaaagggcggctcccatctgcagcgcggttcaggcaacggatggtcccttgagtggggacgacgacctggtgctccaagcgcaccggacacaggcgaggggcgaactaccccgtaaggggtcccggggcttttcagtccccgggaaaggaggaaataatgaaggtttttgtcattg

SEQ ID NO: 1553 - DNA, 1353 bp, Bacillus sp. FJAT-29814
atggtctttgtgttaaatgcgaataaacaaccgttaaacccttgccatcctgcaaaggcaagaaggttactcaagaaagggaaagccgtagttcataagaagtttccgtttactattcgattaaaggataggaaagatatttctttgaatcaacaaacctatcgaatcaaaatggatgttggttccaaaataacaggaatcagcatcatgaagaagaatgaagtggtgttcttagcggaactccaccacaaaacagacatcaaacaaaagttagaagcccgtcgttcttatagaaaatcaagacggaatcgtaagacccgttaccgtcaagctagatttttgaaccgtaaacggtccgaagggtggttgcccccttccctacagtcgagggtggacaatgtaatttcatggactaatcggttgaaaaaactaattcctttgacagatatcagcttagaattagtcaaatttgatactcaaaggatgatgaaccctgaaatcagcgggcttgagtatcaaaaagggaccttacaaggatacgaagtccgagaatatcttttagagaagttcggttggcaatgtgcttattgcggaaccaaagatgctccattggaaattgaacacgtttatccgaaatcaaggggaggttccgatcgagtcagcaacttgactcttgcctgtcgagagtttaacgaggaaaaagataccttaaccttggatgaatgggcaatccaattaatcaagaaaaaggataagcggagcaaacgaattttatccagttttgaccctatcaaaaaacagttacagaaacctttgaaagatactgcagttgtcaattcaacccgttggaaactttatcaaatgcttttgaccactgatttaaaggtggagtgtggaaccggggcaagaacaaaaatgcaacggatacaacatgaatttcctaaggaacattactacgatgcggtttgtatcggagagtctactccttccaccccaatacactttaaaactaactatgtgttacaaatcaaagccaaaggacgaggctcaaggtatcgatcgggaacagataaatacggttttcctatccgtcagttaccgagagtcaaaatgatccatggctttatgtcgggagatatggtcaaagcgattgtgcagagaggtaaatatctgggaacttggttcgggcaaattgctatgcgttccagtggttatgtggatatcaaagatatgaccggaaagcgaatagcacaagggattcaggtaaaatgctgtcagcttgtacagcgttttgatggatattgctattttataaacaaacgaaaggagtcggcaattccgcaccatgtgtga

SEQ ID NO: 1554 - DNA, 287 bp, Bacillus sp. FJAT-29814
gtcaactacccacgccccaaaaaagcgggggcttgtgaaagtaagcccgcagttgtccagtttcagtttcttttaggaaactacgttggtttggtcatcatacccaaggatacttccctagtccttggctctatggaatctcattaaaagcaagcaagggtgttagcgagcggtgtgggattcacgacaagcctgtccaaccctaacgaagggaacagccttacggttgtgttacccgtgcaaacggagaaagattcacaatctttaaaaaggagccgagtcggatg

SEQ ID NO: 1555 - DNA, 1386 bp, Unknown
  GENOME_ACESSION: mgm4773634.3 MG-RAST
atggttgctgtattatcaagtaccggtatccgtctgatgccgacatccaactacaaagcacggaagcttcttgcaagcggccgtgcagtcaaagagaaatacaacccaatcttcacgattcggcttttagatcggagtaacggagaaatacagccaattgaatacgattctgacacaggagctatccatgtagggatctcgatcaaatcacaaaatcacgaatatgtgagcgaacagagagatctcctctctgatgaaacagagcggcatgatatgcggagaaaataccgcagacagcgaaggagccggttgcggtaccggaagcccaggtttgataaccggagagcctccaaaaaagaaggttggctccctccaggcatccagaaccgtatggaccagcaagtccagatttttgagaaatacgctgaaacgttccctgttacacaggcaaccttcgagatgggatccttcgacacccagcttttacaggcggtcgaatccgagaaaccggagccgaaaaggacagattatcagcaaggcccaagataccggacagaaaccctgcgacaggcagtatttttacgtgacggatatcagtgctgcttctgcggacgtggtatcaaagaccacgcaaagctccatatccaccatctggggttccggaatggagatcatacgaaccggatgagcaatctggcaacagtttgcgaaaaatgccatacgccgaagaaccataaactgggtggcatcctttatgatgcgaaacccaagctgaaaccatttaagggggcggcgtttatgacagcggtacgatggaagatgtgggacatgctaagaacatccagaaccgacatagagttccatatcacttacggaaccaggacaaaactgacccgccagaagctgcatctggagaaatcccacgcaaacgatgcgtatgctatcgggaacttccatccgaagcaccggacacaaacggtttatctgcagaaacgccgcaggaataaccggtgtctggagaagttttacgatgcaaaatacatagacagccgtaccggcaaaaaggtcggtggacaggaactgttttccggaaggtcaaggcggaaccgggacctctccggagagaacctacatcgttaccggggaaggaagatctctgcagggaggcgggtaatccggaccagacattatctaatccagccaggaaccattctgaaatttgatagaaagcggtatctggtcaaaggggttcattgtaatggaacccgtgtaatcctggagaataagaaatcggtatcagttaaaaaagtaacaattattaaatacaacggtgggtggattcccgtcgagaaagggaaacgggagagtttatcagggggcgactga

SEQ ID NO: 1556 - DNA, 370 bp, Unknown
  GENOME_ACESSION: mgm4773634.3 MG-RAST
gtcaactactcggtcattgaataaccgagcatgcaaaagcaagatcttgcgtgttcgattattcttggttgcctgtttcgacaggcggttgattagccttagctgtccggtacgggaaaccgacgaggcggctacgttgtccgggaagatacaggcacctggggattcttcccacgtccccagctctgcggccgtgtattaaacatccctgagagtaagggaagtgtgtacggtacttataaccccggccaacattggcgatgggaaccacccgaacccaggtgtttttgcctggaagtaggagatacccgttcagattcatcagtaacgggaaggcgtaagccatcaatggaaaggaggcaccggaatg

SEQ ID NO: 1557 - DNA, 1500 bp, Human gut metagenome
atgacaggcagctataccaattttaccgtcttatttccttgtcgaatagttgacgtaccccaccgaatgacaggcagctataccaggctacgggaggaaaagaaaatggcagtatgtgttttaagtgcaaacggtgaacggctgatgccaaccgaaaattacggcaaagtgcgccatctgctgaaggagggccgcgctgtgattgcaaagcgaaacccgttcaccatccagctgacctacgagaccagtacctatactcagtccatcgaaatgtgcgtcggcaccggatatgagcatatcggcgtcagcattaagacaaaggcaaaagaggtcgtatcgcagcaatatgatttgctcacgaacgagcgctcccgccatgacgactgccgagtgcaccgccggacgcgcagaaaccacctgcggtatcgggctgcacggttcaataaccgtgtatccatcagaaagcccggttggattgctccgtccctggataataaggtggagcggcacctggatattatctcccgctatctgtctgtcatgcctgtcacggatgtctttatcaaggccgcaacatacgatacacagctccttgcggcgctggaggcaggggagcctgtcccgcagggcaaggactatcagcatgggccgcagtacggccacgatacgctgcgggaagcggtctttgaacgagaccactatacctgtgtgtattgcaagagaggcctgaaagacggcgctatccttcatgtccatcatgcctactactggaagggtctgcatgggaacagcatgagggaacttgcgacctgctgcgagaagtgcaacacacctgccaatcacaaggagggcggaaagctgtggggcttcgataagcctctgcggaaatataccggcgaagcgtttatgaatagcgtgcgctggattctctaccagcgtgcgatggctcacttccagggcgctgcggacatacacatgacctacggcgttatctccaagcgtgttcgcaccgacctcggcctcccgtattcctgcgctacggatgcctactgcatgggcgagctgcgtccagaagccagatgcgaaacagaggtcttccagaaatacaggcgaaacaacagagtcctatccaaattctatgacgccaaatactacgacacacgggaaaagggagttatccgctctggcaacgagctgtcctccggtaggacgaatcgcaatcataaccttgacggtgaaaatctgcgccggttccgtggctgcaagaagtcgaagggccggacctcgaccagaaagcagagatatgccttgcagccaggagatgtcgtggtctttggcaatcgcaaatacgtttccaagggctgctccagctatggcagggaattaaagctactcacggatggaaagccgcttgtggtcagcacgaagaaaatccagcttgtcagtcacaagggcggctgggtgcggcttccccaggcggcagccggggcaaaagaataa

SEQ ID NO: 1558 - DNA, 313 bp, Human gut metagenome
gtgcgtaccatcaaacccagtgtatctttggcgatgtggaccacagtaacgccgtgcaagcggtaagtgctgatttaccaaatttttggtttttcttgaagcctgtatcgaagactaccaacctacattgagttgatacccccgccaagtagctataccctatggcgaatacagcaatcaactctcgattgttgacgtaccccaccaaatgacaggcagctataccaattttaccgtcttatttccttgtcgaatagttgacgtaccccaccgaatgacaggcagctataccaggctacgggaggaaaagaaa

SEQ ID NO: 1559 - DNA, 1080 bp, Unknown
  JGI1357J11328_10012623 JGI
atgttgaccagggtaagcaggattagggcaggcaacccgcttgagtcttgctccgttgcggatagtgccaaagaccgacggcagagtgcttctccagccctgccctctcgaactcacgccagcagacacgccgggtcaggcacgaaacggggcgcgagagacgaccggtccgcaacattcccgaggagagccttcgagacggatgccaatctcgacgcgtcacggcccaagggtacgaccgaaggccgtctcgtcgcgaggggtaacccccgcgttttcgttctcgaccggcatggacgcccactcatgtcgtgccgattctgccgggcaaaggaattgctcgataagggtcaggccgttgtctacagtatccgccctttcacgattcgtctcgttgaccgtgtgggtggcgcggtccaaccggtccgcgccaagatcgatcccggctcgaagatgaccggcatcgctgttgttcgcgatgttgagcacgttgatgcaacgacaggtgaagtcacccgcgaagccgtggtgctgcacctgcttgagttagagcatcgcggcgcgacgattcgaaggcgccttcagcagcgtcgcggattccgtcgccgtcgccggtcggcgaatctccgatctcgcgccccgcggttcgacaaccgaacaagacccgatggctggctcgccccgagcctacaacaccgggtcgtcacaacaatgacgtgggtctcgcgcctgagacgagcgtgtcccatttccgctctctcggttgagagggtacgcttcgacactcacgctctcctcaacccggaaatcgatggcgttcaataccagcgcgggacgttgttcggcacggaaattcgtgagtatctgctcgcgaagtggagccacgcctgcgcgtattgtgacaaggcaggcgtgcccctgaacacagatcacctcgttgctcaggcgcggggtggctcggatcgggtgagcaatctcgtgatgtcctgcatcgactgcaacacacgaaaggccgatcggctgatcgaggagtttctcgcgcatgaccctgagagactcgcgagcattctcgcgcaggca

SEQ ID NO: 1560 - DNA, 327 bp, Unknown; identical to SEQ ID NO: 389
  JGI1357J11328_10012623 JGI

SEQ ID NO: 1561 - DNA, 1329 bp, Unknown
  Ga0099364_10003009 JGI
atggtatatgtaataagcaaacagggaaggccgcttatgccaaccgaaaggcacggcaaggtaaaacatttgctccgccaaggcagggcgaaggtactgacgacaaaacccttcaccatacagctgctttacgactccgcagagcacgtacagccggtcacattaggcatagacacgggctacctaaatatgggcttcagcgccgtctccgggggtaaggagctcatatccggcgaagtcaggctgcttaaaggcatgtcggggcgcatctacgaacgctcaatgtaccgcaggccaagaaggaacaggctgcgccaccgcaggaacaaaggcaagcttcacacaaagccaaaagggtggcttgcgcccagcatcgaacacaaggtagacagccaagtaaggttcattacaaacaagctggctaaaatcttacccgaaccaaaagtcatagtggaaatagccaacttcgacatccagaggcttatgaacccggacatagaaggcaaggaataccagcagggtaagcagtacgggcacatcaatgtccggcactacgtattccaccgggataactacaagtgccaaaaccctaagtgtaaaaataaagacccgaagcccaccttgatagctcaccaccttcgctttaggaatgacggcggcaccggcaggccggacgaccaagtaacgctttgcagccagtgccacagctccgcaagccacaaaagctttttaaaggactggaagccaaagaacagggggtttaaggcggagactttcatgactgcaacctataggatgcttattgagcgcctgacggcattgggctttgacacggactacacctacggctacatcacaaaagccgacagggaagccctagggctggagaagacgcacgccaacgatgccttctgcatagcgggcgggacaaaccagacaaggatagagccattgacctatcagcagatgaggcgcaataaccgcaatcttgaaaggttttacgacgcaatctacatagacacccgcaccggcgagaaagcatccggctcagagctgtgcagcggcaggactacaaggaataaaaacaaaaacggcgaaaacctccgcgtttaccgcggcaagaagacccgcgagggccgacgcagcattaggaagaaacggcacccttaccagcctaatgacttggttaagcgcaatgggcaaatctatacagtcaaaggcagccacaatctaggcgcacgcgtcatgctaaaagaaaccggcaagtcagtgcaagcaaagctgctggagccatacagatacagtaaaggcttcgtttgcttggcataa

SEQ ID NO: 1562 - DNA, 298 bp, Unknown
  Ga0099364_10003009 JGI
gtcaactacccaccgcttagcgtctagcgacgcttgaagcgggggcttgcaagaaacacggacttgcagcccggttgattagcctcagcctagcaataggctacgttatgcgggaatacatagttgcccccggacgctccacaaatccggaaggcaaggacaacggctaaacatccctgaggggtaggggaagtgccggctgacagaaaaccccgcataacattggcggtgtggaccaaccgcaaggccacggcctaagcggcattacgcgggcaaccgcatcatggagacccagatg

SEQ ID NO: 1563 - DNA, 1221 bp, Unknown
  Ga0272440_1006716 JGI
gtgaaaaaagtttatgtagtaaataaagatgggaaaagtttaatgcctactaatcctgcaaaagctagaattttgcttaaagagggtaaagctaaagtggagaagagaaaaccctttactattaaacttacttatggaagttcaggttatgttcaacctataattgtaggtatagacaaaggtgcaaaatacacaggagtttgtgctatgtctgaaaatgaagttttattttcagctcaaattaaccacagaactgatgttaaagataagatggaaaatagaaaaaataatagaaggcagagaagaaacagactatggtatagagaagcaaggtttaataatcgttcatcttctaaaaagagtggtagaataccaccatctattaaaacaaatgtagaagaagtagtaagagttatgaataaaataagattacctatatctgaaatatatgtagaagatgtccaagtagatattagaggattaactgagggtaatacaccaaaagattatcaaaaaagtaacagattagatgagaatttaagaatggcttgtttgataagggatgattatacctgtcagtattgtggaaaatctaattgtaaattagaggctcatcacatagtatttaaaagtaatggaggatctgatacaattactaatttgatatctttatgttcagattgtcacaagaaagttcataaaggattaataaatattacttatggttttaaaaaaagttttcaattaaaaatgagtcaaaggtctatgcaaggtaaaacttacatgtatgaaaagcttaaaggattagcacctgtaaacttaatctttgggtatgaaaccgcaaagtttaggaaacggaataatttagaaaaagatcatgatattgatgctttttgtatagcttctttaagatctggttatacaataaattacaataaggataatttttacaacataaattttagacctaaacaaacaagaaggcagtattttgatcttccaagaaaaggtaagggtagaatcagatatcaagttaatcaagaaattgaaggtttaagaaaaggtgatattgttttggttaagggtaaatttgaaaaacaaataaattctatttatagtaatggtaatgttgcatttaaaaggactaagggagaaccttcagcagtaaagcctaataagtgtaagttattagaaaaaagtcgtacagttgtctacacttag

SEQ ID NO: 1564 - DNA, 272 bp, Unknown
  Ga0272440_1006716 JGI
tattacagaaatagtctctaaaaatatagacaaataagactatattcatgaggctaacagagggcttagaaaataagcagaagttagattttgtatcacacctttaaatgttattccagtttaaagctctgtgttctaattttaagggtagcggaaacgtgagagtgaattagaagtgtaactttatctaacaacctcaaggagtaactaactaccttcgggtaagataaaagttttttattaacttttaataaagaggaaaagtgaaaaaa

SEQ ID NO: 1565 - DNA, 1233 bp, Unknown
  Ga0209212_1034368 JGI
atgcaaagagccttggttttgagttccacgaagaagccgctcatgccctgtcatcctgcaagggcgagggagcttctgaagaaagggaaggcggcggtttaccgtaaatatcccttcaccatcatcctgaagtatcgggttgacggtgaagtacaaccagtggagctgaaggtagaccccggctccaaggtgtccggccttgccattgtctctaagttctccaagggggcagtagccatctggggaacgaacctgaaacacaggggtgatgccatcaggatggcgcttgcatcacgcaggagcttgaggaggggcaggagaaaccgcaagaccaggtatagggcaccaaggtttgacaatcggactcgtcctcaaggctggcttcctccttctctcatgtccagggtggataatgtggtggcctgggcacggaagctaataaggttcgtccccatttaccgcatagcagtggagaccgtgcggttcgacacgcagctcatgcagaatcccgagacttcaggagtcgagtatcaacgaggggaattgcagggctacgaagtcagggaatacctgcttgagaagtggggccgcaagtgcgcttattgtgattcggaggggattccccttgaagccgagcacatccatcccagatcaaaaggaggatccgacagggtaagcaatcttacgttggcttgcgaggaatgtaacaagaagaagggtaatcgggatatccgggagttcttggctgacgacaagcctcggctggaaagaatacaggctcatacaaaaactcccttgaaagacgccgcagccgtgaatgccgccagatacgtaatcgggagggaactcaagaagctcgggctcctggtctccttctggagcggcggacgcaccaaatacaacaggacgaaacagggctatttcaaagaccactggatagatgctgtctgtgtgggtgagtcgggagtcgatgtctgtatctacccggcccataagcccctcagtatctcatctatgggacgagggagcaggcaggtagtgcgaaccgaccgctatggattcccggcaagtaaggcagggagaataaaaagggtctttggtttccagaccggggatatcgtcaaactggttcaacccaacgggaagtatgccggggtacacaagggaaggctggcgggtatcagagtgaccggacaatttgatatcaaggcttcaattggaaaaataacagcg

SEQ ID NO: 1566 - DNA, 260 bp, Unknown
  Ga0209212_1034368 JGI
acctgcgcacatccgtgtgcttgttcattcagcgttttgtcagactcaaccagacctcagcccttcggggctacgttaggggtgaatacatagtcactccgggatacttctccagtcccggactctgcggcaggaagttaaacaggacggaccgggtaaacggacagtgctccctgcataaaaccaccccataacattggcgaggagaccttaaccggcgcaagccgagtgagaagaaaggtagctttcaaatgcaaaga

SEQ ID NO: 1567 - DNA, 1326 bp, Unknown
  Ga0123353_10014374 JGI
atggtctatgtcgtatcacacgaaggaaaccctttaatgccgacgtatcggcacaataaggtatctaagttgcttgatgagagaaaagctgttgtgataagcaacaacccgttcacaattcaactgctttatcaaacggaaaccgaagtaactcaaccaatcacattaggcatcgacgcaggctaccaaaaggtcggttacagcgcaataactgaccaagaggaactcatcggcggcgaactcgaactattacacggcatgaagaagcgtatagcggacgctgcaatgtatcgcggtcagagacgcggcaggctccgccaccgtgaaccgcgttttgataacagggcaagagacgagggctggctggcaccgagtatacagcataaacttgacagccatatacggctcatcgaaaaggtacttgggctaatgccagtgacaagtatcataatcgaagtggcaagctttgatacccagctattgaagaatcccggtattcgcggcaaggagtatcagcaaggcgaactaatggacttttggaacacccgtgaatatgtacttcacagggacaagcacaaatgtcagaaccccgattgtacgaacaaatcagagcagccaacacttgaaacacatcatatcatataccgcaggaacaatggctctgacgcgcattggaacctcgtaacgctctgtagtaagtgtcatacacctcaagcacatgatacatggctcaaggattggaagcctaaatacaaaggttttaaggctgaaacgttcatgtcaatggtacggtggaaactgatagaactgctctcggagtacaatgtgacacatacttacggttacgagacgaaggttaaacggttagcattaggtcttgataagacacatgccaacgacgcgtttgttatagccggtggaacgacacaggccagatgcaagcagattaattttgcacaaagaagacgcaataaccgctgcttggagaaatggtacgacgctaaatatacagataatcgtaccggtaaacctgaaaaggcggcaatcttgaataacggcagacgtacacgtaacaaaaacaaaaccaaacccgaggacaatctaaaggtgttccgtggtgagaagttaagcaaaggccgccgctcgataagaaaacagcgttatccgtatcagccgggtgataaagttctttttgagggtaagagatatacggttacaggtgctcactgtaagggaaaaagcgtaatacttaaagagaccggtaaatcggtagcaggaagcaaactaacacatctatcatacggcaaaggtatggtagctgtgtaa

SEQ ID NO: 1568 - DNA, 337 bp, Unknown
  Ga0123353_10014374 JGI
gtcaactacccaagtctaaagagcttgggcttgtagtaaaacgcaatacgagcccggttgaatagcctaagaccttcgaggtctacgttacccaagaataattcaataggcaccatagggtacttcacaagctctatgcaactgcggtacatggttaaacatccctgtgggtaggggaagtgctgtgtacagtcacaacttaaggcagaacccgtaacgggcctatgctggtggcttgaaaccttgggatacccttggcaatgtgaaccgatacggtcagatagtaccagcttaccgctaaaactatcaaaaaaatgggaaggagtttatcgcaatg

SEQ ID NO: 1569 - DNA, 1338 bp, Unknown
  Ga0209124_10001910 JGI
atgacgtatgtattggatcaaaacggcaaccccctcatgccaaccgagcgtggcgggaaagtccgaattctgttaaaaaccaaaaaagccaaagtggtgtgtcgtaacccgtttacgatccaactgctttatgatagtaaggcgtttacgcaacccgtaacgctgggtattgacagcggatatgccgaagtgggctattcggctgtcactgaaacaaaagaactcatgggtggcactttaaaactgctcacgggccagaaaaaccgtctcaaagaacgaaggatatatcgccgtacaaggcgtaaccgcttgaggtaccgccagtcacggttttcaaaccgtgcaagaaagaagggatggctggcaccctccattcaacacaagcttgacagccagttgcggtttattgagcgcatcaaaaagcttctgcccatcaccaaaacgatcattgaggtcgcctcctttgatacacagaaaatattaaaaccagatattgaaggccttgagtatcaggaaggcgcgcaaaaagacttctggaatgtaagagagtacgttctacatcgggataaccaccaatgccagaaccctgattgtaccaacaaagccagtcagccgatcctgcgtgtccatcacattgtatttagagacaacggtggcacagataaaccttctaacttgattaccctgtgtacccagtgtcatgtttctaaaaatcatcaggcgggacagttcctgcatgactggatgcaaaacggcaagaaagccccaagtctcaaaggggcgacctttatgaccatggtgcgctggcggttggtagacattctgaaagacgtaggcgccactgacatcgcctatggatatcagaccaagtctaatcgcataactttaggtttggagaaaagccatcacaacgatgccttctgcattgcacatggcgaagaacagaaacgattgtcagcgattgactatctgcaacggcgacgcaacaaccgctcccttgaaaagttttacgacgcatcctatctggacatacgggacgggatcaaaaaaagcggtaaagaactttcaagtggtcgcacaagtcgtaacctcactgagaacggcgaaaacctccgtccttaccgtggtgaaaaagtccgggtcggccgacgcagtatccgcaccaggcggtacccttttcgatcaggaaacatcgtttcttatgagggtatttgttataccagtggcggaagccacaacaagggcaacagtgtcaaactgttggaactgaaacgttcgatcacacccaggaagctaaaattaatacagtacaatgcaggcatcgcctgtgttgcttaa

SEQ ID NO: 1570 - DNA, 290 bp, Unknown
  Ga0209124_10001910 JGI
gtcaattacccaccacttaaattctaatgaattttgaagtgggggcttgtataagctcagttgattagccttagtccttgaagaagggctccattagcttttaatgtataggtaccatgggatgccccacaagtctcatgctctacggtgcgtgattaaaccgtttcgatgggtcgaaaccgtgttgcgcatattaaacaaaagcataatattggcgatgtggacaaaccgccgttaacgcaacttttgccgagacggtgcggattaactttacaaaggagtttcaaatg

SEQ ID NO: 1571 - DNA, 1224 bp, Unknown
  Ga0216255_10040300 JGI
atgccatgtggacctcaaaaagcaaggagattattaaaagaagaaaaagctgaagtatttttgttggtaccatttactattcgtttaaccattgtaactggagaaactgtacaatcctgtatagctgggattgatcctggatttagcaatgttggaatatctattgttattcttggaataaaagaagttttgagtatggaatttctattaaggacagatattgttaatctcaattccgaaagaagtcaatatcgcagagggaggcgttatagaaagacctggtatagagcatcaagatttttaaatagaaagaaaggtgatggctggcttgcaccatcgattcaacataagaaagacagtcatgttaaaataattgatttcataagcaagcttgtgccgattaaaaaaattattatagaagttgcagcttttgacattcaaaagattaaaaatccagcgattcaaggaaaacaatatcaagaaggagatcaaaaggatttttggaatattcgtgagtatgttctgcatagagattctcataaatgtcaacagtgtaagggtaagtcaaaagacaagatattgcaggtacaccatattgaatcacaaaaaacaggtggtgaccgtcctgacaatctcataactctatgtttagaatgccatgcaaagctgcatcaaaacaaaatacagttaaaagttaagaaaagaaaaggttttaaagccgaaaccttcatgtctacggttaggtggaaaatagttgaagatttaagaaagcttggatacgatgttgaacatacatatggctacattacaaaaaataatcgtatcaaaatagggttagaaaaaactcattgcaacgatgcatttgtaattgctggcggaacaacggaggcacagcctctcgcagaagaaagaagttgtatccaatacactgttaaacaggtacgcaggcaaaatagaaaattattcaaaggaataagaagccatttaagaaatactgcgtcaaggcatgttcatggctttcaacgttttgatcaagttatttttgaaaaagaaagatgttttgtttttggaagaagaagctctggctattttgatctcagaaaactcaatgggcaagttattcatcgttctgctaaagccaatagcctgaaactttttcaatcgtttaacactttactatgggagcaatcctcgaataaggcattcgcttcctcccctgattga

SEQ ID NO: 1572 - DNA, 297 bp, Unknown
  Ga0216255_10040300 JGI
gtcaacaaccccccattgaaatgggaggcttgcaagagcctcatgttgactagggagcatatacaataggagatatgtttttatggctgtgcagaagttgtttaggtcaagacaccatggggtactcctctcgctccatgcaacacgggcaactgtttttttacagaagtccatggtactgtcgttagtggttaaaagctctgtgagggtaggagcggtgctgctagcagaacaagcctttacaacaatcccgaagaggccttcactccccacttttagggaggacagaacttgaga

SEQ ID NO: 1573 - DNA, 876 bp, Activated carbon metagenome
atggctgttttcgtgctggacaagcaaggcaagccgctgatgccctgtagcgagaaacgcgcgaggctgctcttgtcgcgcggccgcgcgcgcgtacatcgtgtggttccctttgtcattcgattggtggatcgcctccagtcggaaagtgcattgcagccggtggcaatcaagcttgatcccggcagcaaaacaacaggcgttgcagttgttcgcatcaaggaagaaacggacgaagacaacagcgagattcgcaacatcgcctgcgccatttcactgatggaattggtgcatcgcggcaagcagatcagcaagtcgcttacggcgcgtcgcgccttcaggcgccggcgcagaagccaacacctgcggcatcgccaagcgcgctttgacaaccgaaccaagccggaaggatggttgccgccttcgctgcaacaccgtgttgacgccaccgtgtctttggtgaaacgcctgcgtcgctgggcgccggcaaccggaatacagcaagagctggtgcgcttcgacacccacgccatgcagaatcccgacattgccggcatcgaatatcagcaaggcgaactggcgggttacgaagtgcgggaatatctccttgaagcatggagccgtcaatgcgcctattgcgacgcgaaagaggttcccttggaaatcgagcatatcattgcgaaaagccagggcggaaccgaccgtgtttcaaacctgaccttggcttgccggtgctgcaatcagaagaaaggagccctccccattcagcagtttgtgaaagaccctgcgcgcctggcgcgcatcctcgcccacgccaaggcgccattgaaagacgccgctgccgtcaatgctgcgcgctgggcgctgttttctgcg

SEQ ID NO: 1574 - DNA, 296 bp, Activated carbon metagenome
gtcaactacccccgactaaagtcgggggcttgaagggaacaatcccggaaagccagattgaccagggaaagcggtaaccaacccgctacgtgtactacaggtcgttaagacgtaccggcgaatgcttcctcagttcgccgctctacaaggtctggatcatgctgcggaaaggtaaagccgcgaaggttcggatcgacccgcacagggagccgggcgtacacattcccgaggggagacgccccgtaaggggcgcgtcacaaggcccgtaagggcaaatttggagaaagaagatggct

SEQ ID NO: 1575 - DNA, 1413 bp, Wastewater metagenome
atgaaacaaacacaaacaaaaattgtacctgtgttggctgtagacggtacaccgttaatgccaactacacatggttacgcaagagtgttaattgctcgtggcaaagctgtagctgttaagcaaaagattttcactattcaattattacacgaacacaagacaaacaaagaagaaattaagtgtgaacttaaagttgattgtggttttggaaatattggttacagcgttgtagcgaataatgaagaattaattggtggtgaagttgaattattaactggcatgtcagcacgaattacaacaaaggctgggtataagactcagcgtaatggtcggaaacgttaccgtaagccaagatttgacaatcgcaaacgtaaggatgattggttgccaccatcaaatgaacataaaaacgagtcacattttaaattaattgatttaatgtgttcattatatccagtgaatcatttaaaattagaagctggtaattttgatatgcaaaaattcaagaatccagatattaaaggcaagcaataccaagaaagtaatttggataagaaattaaatcctaacttacgcttggctattttgtaccgtgatgattacaaatgtcaatgttgtggtgattctttaagtaagaataaaaacattaaactagaagttcatcatatagtctaccgttcaaaaggtggctcggattctgaagctaatttggttacgttgtgtacaaaatgtcacacagctaagaatcataaagatggtggcatattgcacaagtggatgcttcaaaagaaaagcatgggtagtttaaaagaagctacgtacatgaatatattagcatctagattaaaacagcgctatccacaagctgagatatgttttggatacgatacggctgaaaaacgcaagtcgttaggtcttgaaaaaactcaccataatgatgcttttgttgtaggtggtggtgtagatgagacaaccatgagagttgaatcatctactaatttcaagcaaaaacgtaggcatgataggtctctaacaaaattctatgacgcacaatacattgatattcgtgatggcaaaaagaaaaaaggcgcagaattaagttgtggtagaactaaacgcaataaaaatcttaatggtgaaaatgagcgaatatttcgcggtgagaaggttttaaaaggacgtgtaactcattgtttaacaaaatatccgattgaatctggtgatataatttcttatcaaggacaaatatatgtctcaggcggaaataaaaacaaaggtgcctatattaaagtagtggtagaaggtaaagaactaagtttaaaaacacctgaagttaaagttcttaaacgtaatcgtggaacttacattacaacgcaaccctcacgggcttgcttgaatccagtgaatggttaa

SEQ ID NO: 1576 - DNA, 301 bp, Wastewater metagenome
gttaagtacccacgacccaagggtcggggcttattagctctgctataagctcgcttaattagcttaagtgatgcttgtcgaaagataagctgaactacgttacctagtaatatataggtacttcggggttgctctcaagctccgaactctacggcttgtaattaaacatctctgacgggaaggagaagtgttgcaagcgtttaaaacattaggataacattagcgatgggaatttgctaaagttttaatccacttataaaaaggatttttatcccatatgaaacaaacacaaacaaaaatt

SEQ ID NO: 1577 - DNA, 960 bp, Human gut metagenome
atggtgtatatacaggacatagatggtaaaccgatgatgcctactacaaggcatgggaaggttaggagactgctaaaagacagcaaagcggtcgttgtgaacacatgtccttttaccatcaaattgatgtacaagacatcaggttacaaacaagagattgtgttaggtgtcgatgccggaaccaaacatgttggtctatcagcaacgacgaaaagcaaagaactttacagcagtgaagttattcttagaagtgatattgtagaacttttgtctacaagaagagagtcaagaagaacgagacgaaataggttgagatacaggaaacctcgttttaacaacaggataaaaagcaaacgtacaggatgggtagcaccttcggtgagacataggattgatgctcatatccgtgttatcgacaacatctgttctatcctgccggtatcccgtgtcatcgtcgaggttgcccagtttgatacccagaaaataaagaatcccgatatctccggtgatgaatatcaggaaggagatcaacttggtttttggaatgtcagggaatatatcttggcaagggatgggcataaatgtcaacattgtaaaggaaagtcaaaagacccgattttgaatgttcatcacatcgaatctcgaaaaacaggaggtgattctccttcaaatcttattactttatgtgagacttgtcataaggagtatcataaaggtaacatcgatttgaaggtaaaacgaggcaagtcgcttcgcgacgcagccgtgatggggatcatgaaatggaaattgtacgatgagttgaaatccagatgcgacaacgtttcgatggcgttcggatacattacgaaatacaatcggattaaatacgggattgaaaaatcccatacatccgatgcgtttgttatttctaggaacttcaatgcgaaacgaattgaacgtcaatatttaaaacgttaa

SEQ ID NO: 1578 - DNA, 271 bp, Human gut metagenome
atataatttcattatatggttttaatatatccataaggatcggattattagcctaagtcttgaaacagagtctacgttatttgagaatacatagttaccaaggaatgtttgcccaagttccttgctctaaggtaagtgattaaacaggagtagtgtatttgcgaaacagtattgcttatatataaaacctcaaaataacattggcgatgggtactaacagggtttttaccctgacttatgttgaataaacattgaattagtttgtaaaatg

SEQ ID NO: 1579 - DNA, 846 bp, Human oral metagenome
atgcgggcgaagtccaacttcgtgaaaaacctgtcgacgagaagagagatgcgaagagccagaagaagtcgcaaaacaagacataggaaggcgcgctttgacaacagaagaagaccggaaggctggctcgcgccgtctgtgagaaaaaagatcgatacccaccttaaggtgatagcggacctgcacaagatattgcccatcgcaaaagtgatcatcgagacatcggctttcgacacgcagaaactcaaagcggacctcaaagatcttgcccgcccgaagggcgaagaatatcagcaaggcgaaatgacgggcttttggaacgcgagaaagtatgcgcttttcagagatgggcaccgctgccagcactataaaggcaaatccaaagacccggtactggaagtgcatcacatcgaaagcaggaggactggaggcgatgcgccaaacaacctgatcacactctgtaaaacgtgtcacgacgcgtaccacaaggggaagatcgaactggatgtgaaacgatgcgcatcgttcagagacgcggccttcatgggcatcatgcgctgggcggtgtacggcgtactcaaggaggaacacccagatgtatcgatgaccttcggctacaagaccaagaatgcacgaatagagaatgggttagaaaaatcgcacatagttgacgcgcgctgtatatcaggaaaccctcttgccgccccggcagaatatatcttcgtgcagaagaaagtgagaaggcataaccggcagatgcacaggaggactatcggtaagggcgctatcgtaagagaaaccaggcgctgcacaccatcttcggtttcagattgttcgacaaggtaa

SEQ ID NO: 1580 - DNA, 299 bp, Human oral metagenome
gtcaactacccacggctaaagcatatgggcttgccgaagcccgtcagggcagatgtaaaagccccggttgactagcctaagtgttttcgagcactacgttacctgagaatatataggcaccgtggaatgtactacctagttccacgctctgcggcatgtgcttaaacagttccgggaggtaggcccagtgctgcatgtgaaaacctgcggataatattggcgaaggtagcattacgaccgcacgcgccggcttacagcgtaaagcgtgcaatatcttatgaaaggagcgatgccctatg

SEQ ID NO: 1581 - DNA, 1128 bp, Unknown
  Ga0222708_1003174 JGI
atgcagagagtccccgtacaaaaccctgatggcagtccagccatgcccaccaagcgcagtcgcgctgaagcgtgggtgaggcaaggcaaagccgaatgggtcaagaccgatctcaggattaaagcagttcgactgctaagagaaccctccgggcacaatacccaggccattgtggtgggagtagatcccggcaagctctactcaggcattgccgttcagtcggccaaagccacgctgtttcaggctcacctggccctaccctttgagcgggttagggaacggatggacaatcgccgcatgttgcgtcgttctcggcgcagtcggcggatcaaccgggatgttccctttgcactccgcaaccaccggcagaagcggttcgataaccgccgtggcagcaaactcgccccctcaatccgcgccaaccgccaacttgagctgcgcgtagttcgggagttgtctaccctgtttccgattaccgccattggctatgagaaggtcaaggccgatgtggacttgacctcgggccgcaagggtgcccgctctgggaaagggttctctcctgtaatggtgggccaggcctacgccattgagcaaatgagccagattgcgccggtctacacccgctatgggtggcagaaggacggcaatgggacatctcaacttcgcacggctctaggcttggttaagtccaaaaacaaagcagagcagaccccccagagccatgccgtcgatggtgtggcgctggcctgcgggtacttcattgagtaccagtcctttcaccagtgccgcaaccatggccatgattggtttggccaggtcaatatcacgacggcaccatttgccgtgattaagcgcccacctatctctcgccgccagctccacctgatggttccggccaagggcggcgtgcgccggaaatatggcggcaccatcactcggcatgggttcagaaaaggggatctagtcaaagctgagatggcgggccgggtgtcggtcggctatgtcagcggggacacggagcgacaggtttcggtctccgacatcaattggcggcggattggccagttcaccgcatccaaagttcagcttctttatcgcgcaacgggcatcctggccacctgcccgcag

SEQ ID NO: 1582 - DNA, 229 bp, Unknown
  Ga0222708_1003174 JGI
ttcaatgacccccacttagcaaagctgaagtgggggagtggccggagataacccggtcgtaactgcgaatagagccattgagcggttaacgagcaaacacttccaaattcttctctagtttggattagatgtgagggggcagaatctagctccactgggtcattccaggacacagcgttaaccgtggcgtaagagaccagtagttttggaattatcttccacatgcaga

SEQ ID NO: 1583 - DNA, 1482 bp, Unknown
  Ga0207145_1003 JGI
atgcttgccagttccaagctctgtaacatagaagctaataagactgagggtataagtccgtgcttctatgatatgccgctgattaacattagcgaggcacacgttaccccagaaatgggcgaaggaaaaaacatggtactagttatcgacaacaataaaaagccggtcaacccctgccgtcctgcagatgcccgactattactaaaaggaggcaaagctgctgtctttagacggttcccatttactattattcttaatgaagactctcttcaaaaggttagaccattacgtttaaaaattgatcctggaagtactaccactggcatggccctagtggatgacaaaacgggaaaggttattagtgctcttgaaattagccatcgcagtaaaacaatttcacgatctatgatatctcgggcaagctctagaaaatcgagaagatacaggaatacccgctatcgtgaagcaaggtataacaacagaaaaactgcgagtggatggttgccaccttcttttggcagcagaattgcgaacgatgaaacctggataaaacggttcatgcgatatagccccatctcccacataagcgtagaaattgctaaattcgatacccaattgatgcagaatgcggagatttcggggattgaataccaacaaggtgcgctccaaggatatgaggtgagagagtaccttctggaaaaattcggtcggaaatgttgctactgtgggggtaaggatcgtccccttgaaatagaccatattgtgcctaaatcaagaggaggaagtaatagagtctcaaacctagctatctcttgtaagtcttgtaaccaaatgaaaagtaatcaaaatgcgcatgaatttggctatcctgaagtgcaaaaatatgctcaatcatcattaaaagatgctgcagcaatgaatattacaagaataattcttcttaaacgaatagaaacgaatggcttgccgctagaaacaggcaccggagctctcacaaaacttcatagaatggagcaaggtcttgagaaagcacattggattgatgcagcgtgtgtagggatctcgacaccaaagaaattattaataaatgatctacaacctttgctagtaaaggctacaggtcacggctcacgccaaatgtgcaaagttgataaatatggttttccgcgcactcaatcaaagaaaaataaaaaaaagttcggctttcaaactggcgatatgatcaaagctatagtcaaagatgggaaaaaaaagggtacccatcttggtaaagttgcggtaagatcaagtggatacttcgacatacttagacctcagggaatagtaacaggcattaaacatacagcatgtagaatcattcacaaatctgatgggtatagttatagctacttgcctatcattagagaaaagaatagattggtggagttgatgggactcgaacccatcacctcatggatgccatccatgcgctctaccagatga

SEQ ID NO: 1584 - DNA, 315 bp, Unknown
  Ga0207145_1003 JGI
tggtggagttgatgggagtcgaacccatggcctcgtcaattaccgcgccattattggcgcagctcaacagctcgcgttgaccagcttcagccaggactagtgtagtcatcgggctacgttaattaggagcgctaaaaatcacaccttgggatgcttgccagttccaagctctgtaacatagaagctaataagactgagggtataagtccgtgcttctatgatatgccgctgattaacattagcgaggcacacgttaccccagaaatgggcgaaggaaaaaacatggtactagttatcgacaacaataaaaagccg

SEQ ID NO: 1585 - DNA, 867 bp, Unknown
  Ga0376510_00006 JGI
ttgagcatatttgttctggatacaaacaaaaagccgcagaatccggtacatccggcaaaggcaagactgcttttgacagaagggaaagccgcagttttcagacagttccccttcacgatcattttgaaagagaaagtcttggacgtggcatcaaccccattgcggatcaagattgatccgggcagtagagagaccggaattgccgtgattaacgacgattccggagagattgtttttgccatggaactgagacatcgaggccaacagatcaaaaacaatctggaagcaagaagcgcaatcagaagatcccggagaaaccggcaaacgcgatacaggaaaccgcgctttgagaacaggaccaggccggaaggatggctgccgccttcattaaaaagccgggtttataatatcgaaacctgggtcaaccgcttgtgccgattttgcaatattcaggcaatttcaatggagttggttcggtttgacatgcagaaaataccgcattggctcgatgccgcctgtgtaggcaaaagcacacctgaaaagatttttcagatcgacaaaaccgtgttgattgtaaaggcagacggtcatggctcaagacagatgtgcagggtaaacaggttcggattcccccggacaacagcaaagtcaactgagaaaaaagtcaaaggctttcagacgggcgacatcgtcaaggcggttgttacttccggcaaaaaggttggaacgtacattgggcgtgtcgctgtcagaaaaagcggatcgtttaacattaaaacagtggacaaaacagtacagggcattagctggaaatactgcagactgcttcacgcatctgacggctattcctacaatacgacgtgctaa

SEQ ID NO: 1586 - DNA, 242 bp, Unknown
  Ga0376510_00006 JGI
gtcaactacccctcggctgaagaccgaggggcttgaaaaagccccgaagttgaccagtctaagtgcttcgagcactacgttagatcggaaataggtaccctggggtgctcgccagccccaggttctacggcaagtggttaaacaggtctaaggggttaagccggtgctacttgcgccaaacccgatcataacattgacgcggcaaacattaccttggaaacaagaggattttaaaattgagc

SEQ ID NO: 1587 - DNA, 1254 bp, Unknown
  Ga0172381_10003644 JGI
atggtttttgtagtagataaaaacaaaaagcctctggctttatgccattctgcaaaagcgagaaaacttttagaccgtcaagaagcagtaataattaatcattatccttttgtaatcaggctaaaaaaagaaacagagggagaagtaaaaaagacttactgcataaaaatagatcccggtgcaaagtttacaggtcttgcaattctcaataacaatgaggagattgtattctgtgcagttattcagcataaggcatttgagataaaagaaaaacttacttccagggcttcattaagaagaggaagaagggcaagaaataccaggtatagaaagccccgtttttcaaacagagtaagtaataaaaaggctggatggttaccaccttctttaagatcaagaatagacaatataacaaactgggtaaaaaagcttatggctatatgtcccataggagaaatttactttgagaatgtaaagtttgacactcagttaatggaaaatcctgatgtaaatggagttgaatatcagagaggggaattatatggctttgaaattcaggaatatcttagagaaaagaccggctttaaatgtgcttattgtggcaaagaaggcacgaaagagaaacttgaaatagagcatattattccaaaaagtaggggtggaagtaacagagtaagtaatttaactttagcttgccataagtgcaatcagaaaaagggaaataaaacggctaaagaattcggatatccacaagttgaagtcaatgcaaaaaagccattaaaagacactgccataatgaattcttcccggaaagcaatgtttattgaattaaagaaaataggacttccaataaagacaggtacaggtggaaggactaaatggaatagagtcaatcaaaaacttcctaaaactcattactttgacgcttcttgtgttggtattataccggaaaaattggaagtgaaaacagagcaagtcttaaatataaaggcagtaggaagaggaaaatataaaaggactgatactgataaatacggatttccaagagcttacagggcaagattaggatatttccagggatttaaaagtggagatgtggtaaaaagtatatacggaataaaaagtatagtcagtgtaagagctaaaggcagttttacattagagaataagaaaaatgtttcaccgaaaaaatgtcaattaattcaacgatgtaatggatatgtctataaaagtgagataaatgaggagaggtaa

SEQ ID NO: 1588 - DNA, 295 bp, Unknown
  Ga0172381_10003644 JGI
ttcgaaactactttcttgcaaattccgaaaagtgaaaacttttcattatgtaaccagccaaaagtcgagtgactacgttagaaaagttatgacacccggaggtgcttcctcagcttccggctctgtcgtgtagcattaagcgaggtcgtgactgcggctacagtgtgttacacgtaaaaagcttatctaacattggcgaggggagactttttaaaagcgttacctgctctgtagtaatacagggtagagatggccgaaaggctaaatttaaaaagaaaggaaagcggttaaaatg

SEQ ID NO: 1589 - DNA, 1023 bp, Desulfitobacterium chlororespirans
gtgcataacaaagtaccagtcgtccatcaagacggcactccactgatgccatgctcaccggtcaaagcccggaagctattgcaaaaaggtggggctgttaagaagtggacggaagcaggaatcttctacatccagctcactacgtcaaccagtaaacatacgcaacctctggtattgggatatgaccccggagccaaatacgatggattttgcatagccagtaaaaagcaaatgcaaacatccggcatgatcatcgtcgaaaacagaatcaagaagaagctggaacagcggcgtaatatgcgtcgagccagacggttccgcaagaccagacggcgaccggcgcggtttaacaaccgaaagaacagggagaactggctgccgcccagcatcaaagccaaggtggaaatgcggatagcgtttctcaagcaactcctggccatttatccaatcagtcaagtcgttgtggaagatgtcaaaatcgacggcaataagctcaaaggacaaaagggccgtcaatactggacctggactatggtaggtaaaaccaagctctaccgatggttagaggcaagaacagagttgagcttatgtgaaccggaggataccgccagggtgcgaaaagaatacgggctaaccaagataggcgaaaagaaagcccatgtttttgaatcccaagccgtagatggatttgccttatgcattgccacacttggtactcaagataaaagcgtaaccagcttcagcgtttggagaaggccagagaatccacgaaggcaattgcaccggctagagccgaaaaaaggcggtatcagaccgccttatgggggcagcgttacactgggatttaaaaagaatacggtagtggaatacaaaggtaaactctaccgtacaggcgggacaacgaaggggaggctcagtctgcacagttttgactacgataacaggcgaatcacgcagaataccaagccggaagagtgtcgtaaagtgtttgtgcagagctggtttcacaaaaaagtagtttaa

SEQ ID NO: 1590 - DNA, 250 bp, Desulfitobacterium chlororespirans
gtcaataacccccgcttaaagaagcgggggcttgccctggcgggggcaagggaaacaagttgactagactcagccctgagaggggctacgcgagttgggctataagaacctcctgggtgccagtcccagcctggggaaattcggcagaaccgctaaatgccatgataggttttaacctgtctaagcccggcttgctttgtcgagggacactcaactctgaaaaggaggcacgattaccgtgcataacaaa

SEQ ID NO: 1591 - DNA, 804 bp, Archaeon SCG-AAA382B04
ttgacaggaaaaaaggaggattcttacaccaaagacacaactttaggaatcgacgctggttactcaaaaatagggttctcagcagtcacagataacaaagaacttatctcaggaaaaatggaattaagaaacgacatctcaaaaaaacttgatgagagaaaaaagtatcggagacaaaggagacatagaaacaccagatacagagaacccagattcgataacagaacgaaagaagaaggaggggtggttagctccttcaatcaaacacaaaaaaaaaacacccacataaggttagtgaagaaaatcaagaaattattgcccattgatgaaacagtagtagaggttgcaaatttcgaccaacaaaagatgaaaaacccagaaatctcaggagtaaaataccaacaaggaaccctacaaggatacaacgtcaagaactatttattagagaagtttgattacgaatgtgcttactgtagtaaaagtgatgttcctcttgaagtagagcacataactccaaaatcaagaggaggaagtgacagagtttcaaacttaactataagttgcgtagactgcaaccaagaaaaagggcaaacaaactgcaaaagagtttgggtatccaaagatacaagaaagagcaggagaatccttgaaggaaacagcctttatgaaccaaatgcggtggaaaatagtcaacgaactaggatgcaaacatacactcggacacataaccaagaagaaaagactggaagaagaaatagaaaaatctcacatcaacgatgctttcgtgattgctggcagtgctaa

SEQ ID NO: 1592 - DNA, 320 bp, Archaeon SCG-AAA382B04
gtcaactacccctccctaactcactttgttcgtgaggaaggggcttggtaggagattagccatatgcgatgtcactctagggaagtggcaaatgaactacgttcgggactgagtgtctgacaatacaccttgcgggtgcctcccaagctccacgctctggaaaacatagtggacgacctcacagcgtcctctttcccaggctgtgcaacatcactacggtctacgcctgtcccaccattggcgatggaaacctgacccgcatctacgcggagatgacccttacgggtcgtaaaaaatagtttgtgagaaatatgaagaaa

SEQ ID NO: 1593 - DNA, 1257 bp, Unknown
  Ga0376085_0000839 JGI
atgaagaaagaaaacacaagagttccagtaatttcgccatcgggtgaaccgttgatgccgaccaaagcctcgcgggctagacgctggataaaacaccagatagctaaaccattttggaacgatttaggtatctggtgcatccagttattggttgagccatcaggcagacaaacccaagatatcgttgttggtagcgacccaggtaaaaggtactcaggtattgctgttcagtcttctaaattcaccctgtttatgtcgcatcttgttctgatgggattcattcctaagcaaggcacagcaattgcaggcgtcaaagagaaggtgtcctatcgttccctactcaggcgtggtcgaagaggaagacgtattgcccgtggtaaaactttcaagctcagaaatcatcgccaaaagcggttttccaatcgtaagaaaactaagctagcgccctcaattcgctcaaaccgtcaactcgaaatacgggttatttctgaattatcccaaatatatccaattgcagcaattcgggtagaaaaagttcgagctgatgttgataagacatcagggagaaaaggggctaagtcgggtaaaggcttctctcccgtgatggtaggtcaggcttggatgattgaacagttatccaaaatagcgccagttgtcacagttgaaggttggcttcaagacgggaacggtacatctcaagttcgtgaacgcttaaagcttaccaaaaacaaatctgataaagcctcgccagttccagaaactcatgctgttgatgctgtgtccatagcttgtagtcattttgtccaatacaagccctttcatacagctaatactcgtggctgtacttggataggtgatgtgacggttacaccgtccatcttcaaagtcatctctaaacctcggattacgcgccgaagattgcatgatgccgtgccagccaaaggcggaattagggagcgttacggcggctcaacaacacccttcaaagcgaggaaaggggacttaattgagtactcgacttcatcaaaaggagaaatcaaaaaggtgattggatattgttcgggttacacggggaaaaatctgtctttaagtgatgctaattggttacgtctcggcagattcgctaattcaaaatgtcggattcttgccagaaatacaggtttggtaatttcggggggattgacccccgcgaaattaccctcctatccccctacgaccaaccctaacgggtatggtcgcactaccccggagatctga

SEQ ID NO: 1594 - DNA, 248 bp, Unknown
  Ga0376085_0000839 JGI
ttgaactaccgttcctaaccctgcgggtatagaaacggattccaaggagataaccctggaacgcaagcgttcaatacctcacgagttcagtagcgtcttaacacttccgggtgcttcactagctcggatttcatgtagtccctggaatctcagggggttgggtaatgccaagacacgcgctactcaatgagggaagtgacctcaaacttatctttcgaggattgtatccatgaagaaagaaaacacaa

SEQ ID NO: 1595 - DNA, 927 bp, Wastewater metagenome
atgtccaaagtattcgtcgtggatgccaacaagcacccactgaatcctgtccatccgggttatgctcgtctcttgctgaaacagggcaaggcagcagttctgcggcactaccctttcgtcctcattctgcatgccgaagtggagatgcctcaacttgaaccacttcgggtcaagctcgatcctggcagcaagacgactggcctagcgctggtcaaggatgcaaccggcgaggtgatcttcgccgcagagatcacccatcggggggctgagatcaaacatgcccttgatggtcgacggggcgtacgtcgggggagaaggcagcgcgatacccgataccgcaaaccaaggtttctcaatcgccgacgaccaaagggctggctcccgccctcgttggaaagtcgggtgtgcaatgtcgttacctgggtgaagcggctgaggcgtctttgccctcttgctgccatttctcaggagttagtacgctttgatctgcaagcgatggagaacccagaaattgcgggaatagcttatcagcaaggcaccctcgcaggctacgaggcaagggaatacctcttagagaagtggggtcggaagtgttgctactgtggagcaactcgcctccccttacaaatcgagcatatccagtgccgagctaagggtgggtcagatcgcatttctaatttgtgtctcgcctgtggaccctgcaatctgaaaaaaggaacagtggatattcaggtgtttctggcaaagaagccagatctcctcaagcgcatcctggcccgggccagggcaccgcttgcggacgcggcggcagtgaattcaacgaggtgggcgttatatgagcggttgcaagcggtgggactgcccgttgagtgcggaagcgggggcgtaccaagttcaatcgggccagccgagggctagagaagaccc

SEQ ID NO: 1596 - DNA, 289 bp, Unknown
  Ga0137370_10002449 | GENOME_ACESSION: SagtaG_47_$F_3300012285 GENOME_ID: 35434 CONTIG_ID: 2448 SOURCE: JGI DATE: 2019-01-27.
gtcatgaaccccggcttggaaagccggggcttgcagcagggctacccactctgcggtaggccacgattttccacgtctcacatgagcagactcagtccttcggggctacgttcggaacgaaataggtaccagtgggtgcgcggccagcccactgctctacgatgcagcattaaacaggtctagagggttaagccagtgtgttgcatgtgaaaccgttcctgaaccttgtcaaggccacctttacccgcgcaagcggaggctctgaaaggagcacctatcgatgtccaaa

SEQ ID NO: 1597 - DNA, 1266 bp, Prevotellaceae bacterium UBA3839
atggtatatgtacttaataagaatggtcagcccttgatgccgacagaacgtcatggtaaggttcgtcgtatgctgcgtgatggtaaagctcacgttgtacgacttgaaccttttaccattcaactggactatccatcggaagaagtcgttcaggaggtttcgctaggagttgacgctggtagcaagcatattggtatttctgccacaacggaggaatgtgagttgttagcaatgcaagtggaagagcgtgatgatattgtagaacttatagctactcgtagagaatcaaggaggacacggagaagccgcaagttacgatatagaccatctcactttgacaaccgtcgccgcaaggaaggttggttgacaccaagttcagaaaacagggttgcggcacatctgcgtatcattcatcttgtcaattccatacttcctatagcaaagacaactatagaagttgcacaatttgattcacaaaaaatcaagaatgacaggattgcaggaatagaataccaacagggtgaacaacttggattctggaacgtccgagaatatgtactttcaagggacggacacatttgtcagcactgcaaagggaaaagtaaagacaagattttgaatgtgcatcacattgaaagtagaaagactggtgggaatgcacccaacaatcttataacactttgtgagacatgccacaagcaataccataatggcaacattcaactaaaggttagacgaggaaccaatctccgtgatatggctgcaatgtccattattcgctgggaggtctatactcgtgccaagcgagaatttaacaatgtacatttgacttttgggtatctaacaaagcacagtcgcattcaaaatggcattgcaaaaactcattgtgcagatgctttctgtatagcaggcaacattaaagcagaacgattaccttggctctatatggtgcggatgcaacgtcggcacaatcggtctttgcacttagtgaagccggctaaagggggcttgcgtcaacgcaacatagccccacattggatacctaagacaaaactacaacaatatgatgttgtggaatgggatggtagaaaatcttttatatctggaagcgctaacggtcgtctgtatctaaaagatattcaagggaaatatgtagctacctatgaatctggagcgaagaaagcgataaatgcaaagcacgtgagattcatcagacgcaaacgtggcagcatgataattgagcaattgaccaaaagtgttgtatag

SEQ ID NO: 1598 - DNA, 291 bp, Prevotellaceae bacterium UBA3839
gtttacccacaaaaatgctggcactaacagcctatagtgagtaagccgattagcctcagtcatttaaacatcatatcgagaatatgaatattgaatgaactacgttagaagtgaatgtataggcaccttgaaatagtcgtccaagtttcaagctctgcggtcagtgattaaaaggagcgaaagcaacggtgttactgatatatgaaaccactttataacattggcgatgggcgcataacgggcattagcccgacttacagtattttaaattgaattgaataatccccaatg

SEQ ID NO: 1599 - DNA, 846 bp, Unknown; identical to SEQ ID NO: 1579
  Ga0302321_100092658 JGI

SEQ ID NO: 1600 - DNA, 299 bp, Unknown
  Ga0302321_100092658 JGI
gtcaaccactcgggattgaaatcccgagcatgtgaaccaacagtaggtgcttttaggcaagcatgttctagttgaccaggctcagtgtattaacaactacgttaccagagaatacataggcaccttgggatactcgccagtcccaggctcttcggcagacggttaaataggtgtaagggttaagccagtgctgtctgcataccagaagtggacgctttaagcgtaaaccgtcggataacattgccgaggcacacattacccgcgcaagcggagattaaaggagtagttcgatgcaacgt

SEQ ID NO: 1601 - DNA, 1092 bp, Pelotomaculum thermopropionicum SI
gtgtatcggcaaatgattaccagagttcctgtggtgggcgtggacggaaaacccctcatgcccaccacgccaagaagagcccgcctgttaatacgggacggcctggccaaacgccggagaaacaagctggggcttttttacgtccagatgctccggccagtcggaaccgaaacccaacccatggccctggccgtggaccccggcgcgaagtacgacggcatatcaatagcttcacacaaacaaatcgaactaaaggcgatggtgttcctgcctgttggcgtgccggagaagatggaaacccggaggaatctgcgccgggccaggagattcaggaacactccccgcaggccagcccgtttcgacaatcggaggaggaaaggttactggttagctcccacgcagcgttccaaagtggaatgccggctgaaagtcgtccgggaactctgcaaagtattccccgtctggctcatcgtcaccgaagacgtgcggttcaaccacgccaggagtcgcaacggtaaatacttctccaccgtagagatcggcaaggccctcacttactttgagtacaaaaagctggccgaactcaagctcgtgaaggtatccgataccgacgcctggcgtgagaggttcgggttggtaaagtatacggaacgcaagtgggaacaaacacccgagacccacgccaatgacgccgtggcgatgttgatgggtataaccggctgcgaaaaagccgtcacgcctttctatgtctggcgaaaactccagtacgcccgccgtagcctgcaccggcagcatttccagaaaggcagcaaaaggcccctgttcggtggcgccagcaacggcacttttttccgcaagggcgactgggtggaggcagaaaaagccggagtaaaatatcgcggttgggtctgtggactgccgacggaaaccacgaaactggtgggtgttgcggatgcagacggcaagcggataggccagttcagcccgaagaaagtcaggctgctggccaggtcaacaggtttttcctggataacagcggcatgagttcagcttctttatcgcgcaacgggcatcctggccacctgcccgcag

SEQ ID NO: 1602 - DNA, 240 bp, Pelotomaculum thermopropionicum SI
gtcaaccacccccgcttgtagaagcgggggcttgtcctggcggggacaggggcaactggctgactaggcggcaaccttacagttgcagaagtccgaggggctacctaatcacttccgggtgtttcgccagcccggactatgtgaggcagaaccgctaaatgccacgtacgaccaagaccgtattaagccccgtggacagcgccgaggcgacaatcactccgaaaggaggccgtgtatcgg

SEQ ID NO: 1603 - DNA, 1347 bp, Unknown
  Ga0163153_10017205 JGI
atgaaagtttttgttgttaatcagaatggggaaccgctaatgccaacaacaccgcgcaatgcccgtttacttctgcgcgatggacgggcaagaatctttagtcgcaagccgtttgcaattcaattgctaaactcaactagtggctatgtgcaagataccattttaggcatcgacgcgggctacaagacaatcggctttagcatcgttaccgaaaaagaagaattggttggcggtgaagtcaagctgttggaagaaatgtcggaacggctaaaggaacgagcgaggtatcggcgcaatcgacgggggagcaagacgcgctatcgcgcaccacagttcgacaatcgccgtcgcgatagaggctggttagctccttcgattcagcacaagttggatacacattcacgattaatcgagatgtacaagcgagttttgccgatccagacgatcatcattgagacggcaaactttgatattcaggcgctcaagaatgctggcagtgaagggattgagtatcaacagggtgatcaggcaggattttggaatttacgcgaatatattctacacagagacaatcacgcgtgccaaagtccagtatgcgaaaagagacgcagggaagatttgcctgttcgcagcgagattttagatgtgcatcatatcggattttggaagcaggatcgaacagatcgccctagcaacttgattacactttgcgacaaatgtcatgttagcaaagaacatcaactaaaggggatgctgtggggatgggaaccaaagctcaagggattcaagcccgaaacgtttatgtcaacggttcgttggcggctaatcaatcaacatgatgccatcaacacttttgggtatattacaaagtcggcgcgtatcacgcttgggcttgcgaagtcgcaccataatgatgcctttgttattacttgcggaacaaatcaggagcgctctgaaacaatagttattcagcaacgcagacacaacaatcgcagtcttgagacctttaaggatgctaagtatatagatacccgcgatggtgaaatacgcgggggaaaggaattgtcaagcggtagacgaaaacgcaacaagaatttgtccagtgaaaacttgcgtcaataccgcggggaaaatgtcagaccagggacgcgatccataagaagaaagcgctatccgttgcgacctggggatattgtcttgtataaaggacagaaacggattgttaaggggacgcatagcgaaggaaaaagcgcttttctctacgcgaatgcaaaaccggaaaatgcacaggtcaaaaatcttgttcctatatgtcatatttctggtttgatggcgaatttcgcctga

SEQ ID NO: 1604 - DNA, 255 bp, Unknown
  Ga0163153_10017205 JGI
gttatagaccccatccctaaagggaggggcttgaaccgtaaggaacaagccccctatgattagactcaggtcgcgagacctacgttatcgcgaatatatagacaccaggggatgcttcacaagtcctttgctctgtggacaatggttaaacatcgctgatgggtaggcgaagtgctgttgtttcaaaaccgcgaataacattgtcgatgtgaactacaaccgcaaggttgatcaaaagaaaggtttttgatgaaa

SEQ ID NO: 1605 - DNA, 1686 bp, uncultured Roseburia sp.
gtggcacttttcgatgcttctagtcggaaaccctgcaaagcagacaccgaatctaagaaaaccgtatttcccgccatgcacaggcttatccccgatgcaccgccaccgtttggcagtgtgacactgcatggcaatcatccaaaggagaaattctcattgcaggaacaggcgtatatctatgtgatcggtctggacggcagaccacaaatgcccaccagaagacatcgacatgtgaaaaaacttctaaataccggcaaagcccgtatcgtggaacacgttccctatacgattcagcttttatatgaaaacagccctgtattacagccattgcaactgaccgaaaatcccggtcggacgaacatcggcatcgctgtattaaccgaacagggaaaacttgtattctcagcatccgcagaaacgagaaacaaggaaatacataaattaatggaaaaaagaaaacagcaccgtcagaattccagagccggagagcggaaagcccgacagcgccttgccagaaaacatggtacgacactgaaagaagggcatctggatcggaagcttccatattataaggaagaaaaaccggtcacatgcaaagacatccggaacacggaagccagatactgtaaccgcaaacgaaaaagcggctggctgacaccgacagtcgaacaattggttcgcacgcatctgaacctggtccataaagtacagcgttttcttcccatcacagacatcgcactggaaatcaaccgatttgcgtttgcgttactggatgatccttctgctaccggcattgattttcagaccggtccgctgaaaggatacgatgatatccacgcagccgtatcagatcaacagcatggggtgtgccttttgtgtggaaaagagatagaagcatttacctatatcgttccaaaagcaaaaggcggatcagaaacactggcgaatgtagcaggcgtctgtaactgctgtctggaaaaactgcataccgatcagaacgtccgtgaggaactgaaacagcagaaagagggacagtttaaaaaatatggtgcactaagtgccatcaatcaggcaatcccatatatctgcgaacaactgatccgggaatatggaagctcacatgtgcaattttgcactggaggcgaaacctatcatatgagggaactgctgggctatacaaaagaacaggcgatgacagcaccagcaatagatgcttatgtgattggtctggtatcccttggaatcattccggaggaaaaaccggattttacattttcgcatcagattcgtcagtttcgcaggcaagaccgcaggattatcaaaagccagcgggaacgcacctataaatatcatggcacaaccgtggcaaagaaccgcaattcacgattccaacagaccagtccctcgttggcagactggtatcaggaaatgtgtctgacctacggaaccacacaggcagaaaaaatgcgatcccagcttactgtagttaaaagcacccgaagatacaataacccaaaccgcctgtatccgggaaccgtattttactatcgcggcgaacggcatgtgatgagcggccagctcagtaatggactgtatctgcgagcagtgggagacagtaagacgaattataaggcaaaagaatgttgggtggcgaagcggaatgcggggttggtgtttgtggagtag

SEQ ID NO: 1606 - DNA, 397 bp, uncultured Roseburia sp.
gccagaagaactggaaaaagcactgaaaacgcttgcagaagacctgaagatcaagaccgatgcacgctttattccggtaacacatacagatgaagtcttcctccagcaattatatgacgggaacagacatttgaacatgtcacggggtgtgattcaaaacggcaaaacgatcatacaggaaggtcccttgcatgggctggaagaaaaaatcgtcaaaatcgaccgtcataaacgaatcgcatttctgaaaagcagtgaccagactaaagaagcattactgtttaaagtcggtctcgagattacagaaaaaacaactgcataacgcatatgggtatttacaaagtcagctgctccggcagaaaacacagcaggggcagttgagcagagatacgatgtc

SEQ ID NO: 1607 - DNA, 1365 bp, Unknown
  Ga0307377_10081489 JGI
atgcagcagtttaaaggaaagttaaagaacgtaccaaaggatacttcactagtcctttgctctacaaatctggaattaaacagagatcaaagtctcagtgttccagatagccttagcaaaccgcctttaaacactcccgaagtgaatcaaccgtcaacgaacaacgaggacttaccatcaaaagtgttcgtattaagtatcaaaggtacaccacttatgcctactaaatgttccagggctagaaaaatgttgataagtgggaaagcaagagtagttaaacgattcccttttacaatacaattaaattttgaatgtgaaaatgtggtgcaagaaattagtttaggagttgatactggatttggaaatataggattttcagcaataacagagaaagaggaattaatatgtggtaccttaattctcgatggaagaactaaagaaagacttgatgaaaaaagaatgtatcgtagaaatagaagaaacaagttatggtatcgagaatcgagatggtcaaatagggtaagaaaagaaggctggttaccaccttctactgagagaagatatcaaacacatttaactattatgaagcaattgaaaaagctactacccatatcaaatataactttagaagtagcaaagttcgatattgctaaaattgaaaatcctttaatagaaggccaagattatcaacaaggtacactttatgattatcaaaatatgaaaagttatttgatgagtagagaaaaaggtaaatgccagttttgtggtgaagattttaaaggacaaccttcacatatacaccatattaaatctaaacgagaaggtggcaatgatagaccagacaatcttgctttgttacataagaaatgtcatgaggagatgcatgctaaacatttagaatacaaattaaaatcaaattctgaagattataagcaaactacatttatgaatattatcaacaaaagatttaaacaagatataccagagttgaagattacgtatggaaatattacatttgtcgatagaaataatttaggattagaaaaaacgcattataacgacgcatttgtaatatcaggtggaactcagcaatcaagaacaaaggcaataaaaattaagcaagtacatagaaataatagggtactacaattgaatcgtaaaggatttaaaccatcaatcaagaaggagaaatctaaagttgatcccggagatttgttttgggtagcaggtaaacaatatacttgtacaggaatgttcaacaaaggaaaatatatttgttttgggagtacttctaaaaaagaatatttcaatttctcaaaagtagtaaaaacattcaaacagggcagttttttatggaatatataa

SEQ ID NO: 1608 - DNA, 260 bp, Unknown
  Ga0307377_10081489 JGI
gtcaactacccatgagctaaagactcatgggcttgaatcgtgaggttcaacgtaagagttgattagggagcatattatgcagcagtttaaaggaaagttaaagaacgtaccaaaggatacttcactagtcctttgctctacaaatctggaattaaacagagatcaaagtctcagtgttccagatagccttagcaaaccgcctttaaacactcccgaagtgaatcaaccgtcaacgaacaacgaggacttaccatcaaaag

SEQ ID NO: 1609 - DNA, 831 bp, Unknown
  Ga0310147_000164 JGI
ttgttagtgttcgtacttaacaagcatggaaaaccccttatgccatgtaaaccatcaaaagcaagaaaactgttgaaacaggggaaagctaaagtagtcaaaaaagaacctttcacaattcaacttctgtatggaagtagcggatacaagcagaagtgtatagtgggaattgatgcaggaagtaaaaatatcggtatagcagtaacaactgaagatggcagggtaatttacaaggcacaggtagagttgagacaggatataaaagaaaaaatagaaacacgacgaagacttcgaagagcaagaagaaatagaaagacacgctaccgcaaacccagattcaacaaccgcaaaaaaccaaaaggatggttgcctccatctataagagcaagaatagaagcacattataatctcatcaaaagacttactcaaataattccagtatcaaagattaaggtagaagtagcgaaatttgacgtgcaggctattcttaatcctaacatacatggcaaagaatatcaaaaaggcaggatgcatggttttgacagtgttaaggaatatgtgaaaatcagagatggttttaagtgccattatgccaagttaagacctgatataccatgttcagggaaactgactgtagaccatatcgtacccagaagcaagggtgaaacagacaatccaacaaaccttgtgtgctgttgtgaagcacataatacagcaaaagggaatatgagttataaacaatttactggaaaacaaccaccaaaaattgaggattttcgtcccacagtatttatgaatgttttgagagtttatcttgttccgatgttgcag

SEQ ID NO: 1610 - DNA, 248 bp, Unknown
  Ga0310147_000164 JGI
gtcaactacccaccgcttatagaagcggaggcttgcaaaagccttagttgactaccctcagccagggctaaaacgccatcgggctacgttaggcaagtcatgacaccatgggataatgcccaagtcccatgctctgtcgcatgtacctaaacagtcctgaggggtagggacagtggtacatgcatagcaagcttgcctaacattggggatgggcaaaataactccaaaaggaggaacacttcttgtta

SEQ ID NO: 1611 - DNA, 969 bp, Unknown
  Ga0073582_115410 JGI
gtgttgaagcagaagttattggagagaaatacatacacacccaagagtgctcctccagctcttggcactgtgaccctgtgtttaaacagttctaaagcagaaggaacagtgatgcagagtttaaaaacctctaataacactcccgaggaggctctcacccctaaagcacgagggggacaggacttgagagttcctgttatttatgtgctcaacatgagaggtgatcctctcatgcctacttcaccacgtaaagctagaatattactcaaaaaaggagaagcacgtgtcacaaaaagaacacctctaactattcaactaacaaaacccacaggagaggctaaacagagcatcacattaggagtggatgctggttatagtcatgtcggtctctctgtgacaacacaaaacaaagaattgctatcgtcagaagtaaatcttagaatagacatggttaaacttaattcagatcgcagacagtaccgcagaactagaagaaacagaaaaacgtggtacagacaacctagattcttaaacagagttaagagcaaacataaagggtggctccctccttctgtacaacataagttagatactcatgttaaattagtcaaaaatgtacttaacatacttcctgtgtccaaaatcattgtagaagtaggtaactttgatattcaaaagattcagaacccagagatagagggcaaggaataccaaaaaggttctcaattagggttctataatgtcagagaatatgtacttcacagagacaatcacacttgtcagcactgtaaaagtaagaatgtacctcttgtagttcatcatattgagagccgacagactggtggagatagacctaataacttaatcactttgtgcaagaaatgtcacagtgaccatcatgaaggacttattaagttaaaagttatgaagagcaaaccttttagagcagcgactttcatgtctactatt

SEQ ID NO: 1612 - DNA, 230 bp, Unknown
  Ga0073582_115410 JGI
gtcaacgactctggggttaaaaccccgcagcttgtaacaaaagctgctgtagtgaccagggagctttaaacaagtgttgaagcagaagttattggagagaaatacatacacacccaagagtgctcctccagctcttggcactgtgaccctgtgtttaaacagttctaaagcagaaggaacagtgatgcagagtttaaaaacctctaataacactcccgaggaggctctca

SEQ ID NO: 1613 - DNA, 1296 bp, Anaerobic digester metagenome
atgaatcttgtgtttgtattagatgcaaataaaacaccattgttaccatgccatccaatgagggcacgcaagttgcttgagtcaggtaaggcatcagtttataagagatatccatttacaattattcttaaacgagtggttgaaaatcctgtagatcctaacttagaaataaaagtagaccctggttctaaaacaacaggtatagcagttgttaatccacacacaaaaagagtagtatttgcgggtaatttacaccatagaggagaacggattgtaagtgatttacttaaacgtagccaagttcgtaggggtagaaggaatagaaaaacaagatatagaaagccaaggtttgataatcgtaaaaaagaagagggttggttgccaccttcgttgttatctagggttaacaatgtggtagtatggacgcaaagattgatgaaatattgtcctattggtgttatacatgtagaaacagctaagtttgatacgcaacttatgcaaaatcctgaaattagtggcattgagtaccaacaaggcacattacaaggttacgaggtcaaagagtatttattagagaaatttgactataaatgtgcttattgtgggatacagaacgtaccattagaggtagagcatgtttgggctaaaagcaaaggtggttctgatagagtaagcaaccttgtaatatcttgtgttaaatgtaacgatgaaaaaactaatatgcctattgaagaatttctaaaagatagacctgagctactaaagaaaattcagtctcaaatgaaagcatctcttaaagattcggctgttatgaacgccatcagatatcgaatcggtgatgagttaaagaagttgggtttgccagtttgtttttggacaggtgggagaaccaagtataacagacataaacagggctatccaaaagagcactggattgatgctgcttgcataggagaaggtggtgatgatgttctcctagatcctaatatgcaaattttaataattgaggctattggtagaggtaatagacagatgtgtttaatggataagtatggctttcccagaactaaacctaaacagtctaagcgagttcatggttttcaaacaggtgacatggtacgcttagtgcaacctagtgggaagtatgctggcacatatgtagggaaagtagttgttagagcacgtggagactttgacattattacaaaagaaagacaaaaaataacagcaacatggaagcgatttactttattacaacgctttgatgggtatagctatacttttagccccgcttag

SEQ ID NO: 1614 - DNA, 253 bp, Anaerobic digester metagenome
actttataccctccatggcaacagtttaggtagagggctatatgcccaagttcaaccagtttaagctctatgagagctacgttatccacgaatatatagacaccttggggtgcttctccagctccaagctctgtggtaagtgattaaacagtacaatagcttagaagtgtgcagtgttgcttacaaaaaccgtggaataacattgactaggagaccgttacttttaaaaaggagtgattcttagatgaatctt

SEQ ID NO: 1615 - DNA, 1266 bp, Unknown
  Ga0376687_0067215 JGI
gtgccagagccggaaggaagggcgctgatgggcaccagcgttgctctcgtcatgacacccagtcgtgcttccgaagctcctggagctgtcgcgagagcgttaaaagcacccgtcggggtacgggtcggtgcgttgagcccaacaagcgagagcaccagcggcgaggggagcgtgcctccggatacctgctcgggaccgtcagacagcccggtaacggggccctcatccgagggcacagaaaggagtcaccccatggtctttgtgctcgaccaacacaaaaagccgcttatgccgtgtacccccagaagagcacggctcctgctgacgcgcaagcgggcggtggtccatcggctcagtcccttcacgatccggcggcatcggaccgcagcatccagcagagtaccgtacagccggtggtgctcaagatcgatcccggctcgaaaaccaccggcctggccctggcgcgggtcgaggagagcgaagagggagaggtgcaccacgcgctgcaccttgccgagctcacccatcggggagaggagatccgcgagcgtctgcgcaaacgggcggtctatcgccgccgcaggcgttcggccaacctgcgctaccggccagcccgcttcctcaaccgtcgccgcccgcccggctggcttcctccgtccctgcgctcacggatcgacaacgtcgtgtcctgggcctcccgctaccggcgctgggtcccgctggtgcgcctggaggtcgagcgcgtcaagttcgacacccagaggctcgcagaatagggagatcacaccgccgcggagttcggccatcccgaagtggccgccctggccagccgtcccctgcgggatgcggccgccgtcaacgccacgcgctttgcgctctgtgacgaactgcgcgcgctgggcctgccgctcaccagccttgtgtggaggacgtacgaggtggaaccgtgcccgcttctcgctccccaagacgcacgcgctggacgcgttgtgcgtgggggaactggctgggattgatgctggcgcgcaccagacccttgccatcaaagcgatgggtcggggtcgctacagccggaccaatgtcgacgagtcggggttcccggtgggctacttgatgcgcgcagcgcgcaggttctggggatcaaaacgggggaccgggtgcgggcggtggttcccgaggggtttgcggcgcaggggacgcataccgggcgcatcgcggtgcgagccaaccggcagtttcgcatgggccgtgtgcaggggatacccg

SEQ ID NO: 1616 - DNA, 271 bp, Unknown
  Ga0376687_0067215 JGI
gtcaacgatccccacgcatgaatgcgggggcttgtcccttgtgttgatgccgttttcgttgtccagccgaggtgccagagccggaaggaagggcgctgatgggcaccagcgttgctctcgtcatgacacccagtcgtgcttccgaagctcctggagctgtcgcgagagcgttaaaagcacccgtcggggtacgggtcggtgcgttgagcccaacaagcgagagcaccagcggcgaggggagcgtgcctccggatacctgctcgggaccgtc

SEQ ID NO: 1617 - DNA, 1332 bp, Unknown
  human gut metagenome genome assembly, contig: NODE_8362_length_2558_cov_1.603676, whole genome shotgun sequence WGS
gtgaaggatcacaaccggctgcaaggccgaggagaacaaaacttgagagtatttgttttaaacaaacgaaggaagccgctgatgccgtgttcttcggctaaggcgcgcattctgctcaaagagaagaaggctgttgtagtgaggcgtacgccattcactattcagctgacgatcgctaccggcgaaacgaagcagccggtaagtctcggcgtcgatgccggatacaagcatgtcggcctttctgcttcaacggaaaaggccgaactctatgcatccgaagtcgaactgcgtcaggacataaccgacctgctttctacacgacttgcactgcgccgctcgcgtcgcaaccgaaagacgcgctaccgcgcacctcggttcgacaatcgcgttcgcagcaagcacaagggttggctggcaccgtctgttgagaatcgcatcaatgcacatctttcacgcattgctgccgttcttcgaatactgcctcttacgaagatcactgtggaaacagctgccttcgatacgcagcttctgaagaatccagatgtttcgggcgaagcgtaccagcagggcgaacagcttggcttttggaacgttcgcgaatatgtcttattcagagacgggcacgtctgccagcagtgtcacggcaaatcgaaagatccggtgctcaacgtccatcacttggaaagcagacgtaccggcggcgattctcctagcaatctactcacgctttgcgaaacctgtcacaaggcgctgcaccgtggcgagatcaagctgaaaactcaacgaggcaaatcgttcagagcagaaaccttcatgggcatcatgcgctggacggttctgaatcgactgaagtctgcatatcccgaactggatgtgcgcaacacctacggctatctcacgaagcacgcacgcatcacacatgggattgcaaaatctcattgtgcggatgcgttctgcatcgccgggaatttcggagcaaagcgactcgggtactactacttccaaaagcagacccgtcggcacaaccggcagattcacaagctttcaatcctgaagggcggcattcgcaagcgcaatcaagcgccttacgaagtcaagggattccgtctctttgacaaagttgcatgcaaaggagaaggtgccttcatcttcggccgccgctcatcgggaagcttcgatgttcgaaagcttgatggaacgcgaatttcagcaggcatcagcttcaagaagcttcgtctgctcgaaaagcgcagaacctacttaactgaaattcgaaaggaggcggcgcttccacccctgcctaaacgcaggggtctccgcgtcgatttttga

SEQ ID NO: 1618 - DNA, 248 bp, Unknown
  human gut metagenome genome assembly, contig: NODE_8362_length_2558_cov_1.603676, whole genome shotgun sequence WGS
gtcaactaccccggcctgaaggccgaggcttgaatgagcctctagttgactagcctcagtccgtcatttgacgggctacgttggttgggaatgtacaggcaccgcgggatgtcgatcctagtctcgcgctctgcggccgatagttaaaagctcttagaggtaggagcggtgctgtcggcaagaaaccccttccatcattggtgaaggatcacaaccggctgcaaggccgaggagaacaaaacttgaga

SEQ ID NO: 1619 - DNA, 1842 bp, Unknown
  Draft_c0007806 JGI
atgccgacggaaaggcacggcaaggtgcgccgaatgttaaaagacggcagggcgagagtaatcaaagccaggccgtttacgatccaactaacttacgaaactacaagttacacccaacacattaccctgggcatagacgccgggtaccaagaaatcggcctatctgcggtatctcccgggaaggagttgttatccgccggatgcacccttctaaaaggccaggtcgagcgcaacaaagaaagattaatgtaccgcagacagagaagaagccgcctgcgttaccggaaaccacgcttcaataaccgtaaaaaacccgaaggctggctggccccgagtattcagcacaaactggacagccacctgcgcctggttgcctgggcaaaaaagctgcttttcatcactgacatagtgatagaagtagcaagtttcgacatccaggcaattaaaaatcccggcatccagggaaaagagtaccagcaaggagaacagtacggcttctggaaccttcgcgaatacatcctgcaccgggacggccaccagtgccagaaccttaaatgccgcaacaaaaaccaggtgcttcaaactcaccacataggtttttggaaagacgatatgacggacaggccagggaacatcatcaccctctgcgacaaatgccaccggccggagaaccacaaggaaggcaagttcttgtggggatgggagccgaaagtaaagccgttccgggcagagacatttatgagcaccgtaagatggaagatagtcaacgctctaaaatgccggcatacatacggccatataacgaaatcccgcaggatagggctaaagctggaaaaaagccatgccaacgatgcctttgtaatagccgggggcagttgccaaacaagggcaaatacttttagtatagagcaggtccggcgcaataaccggtccttggggaagttttacgattcccgatatatagatatccgcacaggggagaaagtcagtggccaggagttgaactgtggccggcgcacccggaacaagaatctgaacagtccgaacctgcgggtataccggggcaaaaaagtatctaaaggcagggtgagcataagaaagcagaggtacccgtatcagcccaaagacattgttgaatttggtggctggcggtacacggttaaaggtatgcatagctacggcgcctatatcaatctggcggaattgagcaagccggtgaaaacggaactaggtcagacttgtgcggtacagcaaaggtttttgtgtagcgtagggaaaaacttgtcgctctgcgggcgacccggcattcatctttcgcctaaagaggcgggagtcttctgccggattatgataaatatattatcaggaattaatattacacatttaattgattatgaaagtgatgatgaattgcatactacgcaatttcaaagaacattagatttgctaaaagatacttccaaattgggcaaacaaatcaaataccgtttaggttacaccaatttgacttttgaattatggatgattttacataaagcgaattgtaatactttatttacatatagatggcaatatcttgatgcaataaacagagcatatggtgagaaatttgaaagtctcaaagagtataagcatgaattcaatttcaagagagtgcttggaaaaatatccttacctgaagtgaaagtggcgatcgatcgatccaaggccatcatgcaaacaaatatggcaaatggtctagtgttgcagcagtacaaaggatatcgttattacagagaaaatccgtctctttcagtttgggagcccatcgaaaaaataatgatggattgtggactgatgtaa

SEQ ID NO: 1620 - DNA, 292 bp, Unknown
  Draft_c0007806 JGI
  MISC_FEATURE (11)..(11): Any "n" represents any nucleotide
  MISC_FEATURE (23)..(23): Any "n" represents any nucleotide
  MISC_FEATURE (38)..(38): Any "n" represents any nucleotide
  MISC_FEATURE (48)..(48): Any "n" represents any nucleotide
gtcaacaaccnccgcctatagangcgggggcttggggnagcgtatagnggaaaagctatacgtccccaagcccggttgattagcctcagccaccgggcgtaaagcctgacggggctgcgttgcaatggaatatataggcactccgggatactccactcgtcccggacactgcggccaatggttaaatatcgctgaagggtaggcgaagcgctgttggcgacaaacccgttgtaacattggcgaagtggacccactgcgaaagcagccttgtttccgaaaggagatcaacatg

SEQ ID NO: 1621 - DNA, 1431 bp, Unknown
  Ga0376513_002019 JGI
atgatttattttgtgaaagataagaatggtaaacgtggtcatccgacaagacgtgcagattacataactaaacatttaaaacgtggtactgctaagataattagtcgtactaaagatagcttaacagtaaaactattggatattgaatttaaagatgaagatactattgacgctgaatttagagtaggtattgatcctggtacaaatcatattggatttgctctatataaaatttataaacaaaatattactttgttaataagtggtgaagcagatattagaagtactgatataactaagaatcttattaatcggaagatgtatcgtaatactagacggagatatcgtagaaaaaacgttcttcgtaaatatggaaaagctaagtttcgtaaaccaatttggaaaaacagaaaacgtaaacattttcaacctactttcaagcatttaattaacacacatattaatgtaattaaatatttcttaaatcgatgttcaattaataaagtacatattgaatatgctaaatttgatactcaaaaaatggttaatccaaacattaaatctatttggtatcaacatggaccacaatacatgtttgaaaatactaaatcttatatccgtagtcgagataattatacttgtcagatatgtaataaaaattgtcttgattataatgaagtacatcatattatatggcaagaatatggtggatctgataaaccagataatcttatattactttgtccaatttgtcataagaaagtgcataaaaatcttgttaaatgtccttctattccaactcagaatcttaaacaagcaggtcttcttaattcatgtatgaaatatatatttatgatatttgagaaaagtgtaccgactcaggatactcttggaagtattacaaaaatagtaagaattaattctggaatagagaaaactcatgaaaatgatgctaaaattatagcgttatgtgatagtcttgatttacaagatattgaaaattataaatatatcgacttaaataatcatgtaacagttaaacaatatcgtagacatgatcgagcttgggtaaaaagatatgaagatcgtaaatactatattactggacaaggtaaaaaagtatttgctcataatcgtagtaaatcaactgttcaaaaaactcgtggattagatgagttaaaacaagaattaaaaaaacgtggtataattaataagattcaaattattgctaagcctggtggtccaatatattgtcggggcaatattaataaacgatttattcctggtcaattaattaattataatggagatattgatatctgccgaggttgggcgtctacacaatgcaaagtaatacttgaaaataatggatatgttaaacaaaaattatgcaaagtaattcgtaataatagtggattagtgtttgtttag

SEQ ID NO: 1622 - DNA, 276 bp, Unknown
  Ga0376513_002019 JGI
gtcaactaccgggtgcttagcacccggcatacagatgtgggcatagtccacataagtaatgctagttaaatactagggttgaacagacaatttagctaaagtttacttcagggtgccactcccagctctgaacacactttaaaactagaggtaaaaagaatatagtgtaaatcctcatcgctgactattaggtaacgaagatcagtgctactttagctaaagtcgagggagacgtaatgcaagtttctcagatcagaggaaaattttaaaatgatt

SEQ ID NO: 1623 - DNA, 1008 bp, Unknown
  Ga0071116_1000899 JGI
atgttcgtaccaacaataaacaaccaaggcattccggcaatgccaacaacgccccaaagagcaaggaggcttatatgctctaaatctgctactccattctggagtcacggcattttctgtattcgactaaacgtagatgtgcaagacaataaacaagatatagccatcggtatagacacaggtagtaaaaaggaaggctttagcgtgtgctctaaaaagcacacgtacctaaatattcaggcagatgcattgacctacgtaaaagctaaagtagaaacccgtagaatgcttcgccggagtcgcaggagccgaaatactccatatcgcaagtgccgatggaatagaaagataggaagactaccgccttcgaccaaagctcgatgggattggaaactgcggattgttaatattctaaggcgagtaatacctcttactcactcttgcgtcgaagacattaaagccaaggccaagaaaagaaaaaggaagtggaacatatcgtttagtcctattgaagttgggaagaaatacttctataatgcacttgattcgacactaaagctaaaagtaattggtggaactaagacggctaagctacgaaaggaagccggactcaagaaaaacaagaaaaaactgagcgaaaagttcgagactcactgcgttgatgcgtttgtgttagcgtgtcatatcatttggcgacctataattccggacaataaagtcatcctttgcgtttcgccaatagaattaaaacgcagaatgctacatgccatggtgccttcaaaaggaggaactcgaagaaaatacggaggaacaagatcattaggactaaaacgtgggagtttagtcaaacataaaaaacacggaatatgctacgttggcggcaccatgaaaaatcgaatctcactacataaccttaatactggtaaacggttatgccgaaatgctaagccagaagaatgtaagaaactaacatttaatacatggaggcggcattcctacaatggataa

SEQ ID NO: 1624 - DNA, 179 bp, Unknown
  Ga0071116_1000899 JGI
atcagtaacccacgactaaagttatgggtctgtctgaaaggaactaaccacttctggaggatggattaaaccactgattagacgcatgatttcacggtgaaatcaagctagccaactggacgtggtagtccgaagaatatgcaggatgctcctcaagtcctgcttcccttcgttggcca

SEQ ID NO: 1625 - DNA, 639 bp, Unknown
  Ga0134388_1000763 | JGI
  MISC_FEATURE (141)..(150): Any "n" represents any nucleotide
atgctgaaggcgggcaaggccgtcgtcgtgcgtcgaacgccgttcacgatcaagctgaccatcgccacaggcgagacgaagcaggacgtgacgcttggcgtcgatgcaggcgcaaggcacgttggcatttccgccacgacnnnnnnnnnncgacaggacatcacgggacttctggccgatcgtctggcattccgacgtgcaaggcgcaatcgaaagacgcgctaccgctccccgcgcttcaacaatcgcgttcgatcaaagcacaagggatggcttgcgtcgtccgtcgaaaaccgcattcaggcgcacatgtcgcgcatcgatgcggtctgcagactgcttcccgtcaccaagatcgtgattgaggcggcatcgttcgacgttcagaagatcaagaatccgactattgaaggcacggactatcagcagggcgaccagcttggattctggaacgtgcgcgagtacgttcttttcagagacggtcatgtttgccagcactgtcatggtcgttcgagggacaagatcctcaacgtgcatcatcttgagagtcggaaaacgggcggtgatgcgccaaacaacctgatcacgctgtgcgagacatgccacaaggcttatcacgcaggaaagatcaagttgaag

SEQ ID NO: 1626 - DNA, 300 bp, Unknown; identical to SEQ ID NO: 995
  Ga0134388_1000763 | JGI

SEQ ID NO: 1627 - DNA, 1149 bp, Unknown
  human gut metagenome genome assembly, contig: NODE_4209_length_4046_cov_2.370370, whole genome shotgun sequence WGS
atgctcacgaacgagcgctctcgccatgacgactgccgagcgtaccgccggacgcgcagaaaccgcctgcggtatcgggctgcacggttcaataaccgtgtatcaggcaaaaagcccggttggattgctccgtctctggacaacaaggtggagcggcacctggatattatctcccgttatctgtctgtcatgcctgtcacggatgtctttatcaaggccgcgacatacgatacacagctccttgcggcgctggaggcaggggaacctgtcccgcagggcaaggactatcagcatggaccgcagtacggctacgatacgctgcgggaagcggtctttgaacgggaccactatacctgtgtgtattgcaagagaggcctgaaagacggcgctatccttcatgtccatcacgcctactactggaagggtctgcatgggaacagcatgagggagcttgcgacctgctgcgagaagtgcaacacacctgccaatcacaaggagggcgggaagctgtggggcttcgataagcctctgcggaaatataccggcgaagcgtttatgaatagcgtgcgctggattctctatcagcgtgcgatggctcgcttccagggtgttgcggaagtacacatgacctatggcgtcatctccaagcgcgtccgcaccaacctcggcctcccgtattcctgcgctacggatgcctactgcatgggcgagctgcgtccggaagccagatgcgaaacagaggtcttccagaaatacaggcgaaacaacagagtcctatccaaattctatgacgccaaatattacgacacacgggaaaagggagttatccgttctggcaacgagctgtcctccggcaggacgaaccgcaatcataaccttgacggcgaaaatctgcgccggttccgtggctgtaagaagtcaaagggccgaacctcgaccagaaagcagagatatgccatgcagccgggagatatcgtggtctacggcaatcgcaaatacgtttccaagggctgctccagctatggcagggcattaagcctactcacggatggaaagccgcttatggtcagcatgaagaaaatccagcttgttcgtcataagggcggctgggtgcggcttccccatgcagcagccgaggcaaaaaaataa

SEQ ID NO: 1628 - DNA, 318 bp, Unknown
  human gut metagenome genome assembly, contig: NODE_4209_length_4046_cov_2.370370, whole genome shotgun sequence WGS
gtgcgtaccatcaaacccggtatatccttggcgatgtggaccacagtaacgccgcgtgagcggtaagtgctgatttacctttttggtttgtcgtttggaatatactcggcaaactcaacttcagttgacgtcccccaccaaatgacagggagctataccgtacgattaaattgcaatccggattgacaggttgacgtcccccaccaaatgacaggtagctataccgcagccccccccgcaaacggagcatcacgcacagttgacgtcccccaccgaatgacaggaaactgcacccgcagcgtgaaaggaaaaaataag

SEQ ID NO: 1629 - DNA, 705 bp, Ruminococcaceae bacterium
gtgaaagtatacgtgataagcaaaagcggcaaagcgttaatgccgacgaagccgggcagggcgcgaaaaatgttaagggacgggaaagcgaaagtagagcagcgaacgccgtttacgattcggttgatggtagaaacgaaggaatacacgcagccgataacgttagggatagacgcggggagcaagacggtcggcgcctcggcgacgacagaagcagaagaggtgtacagttccgaaacagagcagagagacgacatagcggaattaatagcgacaaggttagaatatcggcgggcgaggcgcaagcgaaagaggcggtacagaaaaccacggtttcaaaacagggtaaaagcgaagaagcgcgggtggatagcgccgagtatacggcaaaaaatcgaaagccacttgaaaataatagcgagcgtgtgcaaaatattgccaataagcaaaatagtaatagaagcggcggcgttcgacatacagaaaatcaagaacccggagataagcggcgcggagtatcagcaaggcaatcagcttgatttctggaatgtgcgtgaatatgtgttgtaccgtgacgggcacaaatgccaaggcaaaaaaggctgcgcaaacaagatactgaacgtccaccatatcgagagccggaaaacgggcggagacgcgccaaacaatctgataacactatgcgaggagtgtcacaatgcg

SEQ ID NO: 1630 - DNA, 247 bp, Ruminococcaceae bacterium
gtcaacaacccacaactaaagtatggggcttgcggcgaaaacggtaagtcaggttgactactctaagccaggagaggctacgttatacaagaatatatataggcacttgcggatgtatgctcaagtctgcaacactgcggcgcgtgattaaacagtcctgaagggtagggagagtgttgcgcgtgaaaaccttgtaataacattgaggatgggcaactaactctgaaaggagaattatacagtgaaa

SEQ ID NO: 1631 - DNA, 1206 bp, Unknown
  SL_8KL_010_SEDDRAFT_10000047 JGI
atgagtaaaaaagtttacgtgcaggacaaaaacggcgatcctttgatgccgacaaaaccggcaaaagcaaagcatatgctgaacgacggtagagctgaagtagtccaacgctcccctttcacgatccagctaacatacgagatcgaaggagaaaagaacaaacaagaggtggaactcggtctggacccgggctataccaagacagggttttcagcaaaagtggaagacaaagaactgatcaatgggacgatggatacggacaccaacgtgtccgacagattaacagaaagaagaaaatacaggaaaaaccggagaaacaggaatacaaggtacagagaaccaaggttcgacaacaggaaacgtgataacggctggttggcaccgtccatacagcacagattagatatgcacagacaactggtcgacgagatcaaaaagatactgcccgtcgataaagtagtagtagaagtcgcaaagttcgaccaacaaaaaatacaagatcccgaaatcgaaggtgtcgagtaccagcacggcaccttacagggatacaacgtcaaacactacctgttagagaaattcgactaccaatgtgtctactgcggtgcggaggacgtacctctcgaagtcgaacacatcgtgcctgattcgcgtggaggtaccgaccgcgtggacaacctcactatctcctgtcacgattgcaaccaggaaaaaggtgacagaacagcagcagagttcggctaccctgaagtgcaggaacagacaaaagaaacactgaaagaaaccgccttcatgaatcaagtaaggtggcaactgacggaagaactcgacgctgaaccaacttatggccatgtcaccaagaagaaacgaaaggaattggacctcaaaaagtcacacgtcaatgacgctttcgtgatcgcaggcgctgacggcaccgaagagcggtgtgaaccattcaaagtcgagcagcgcagaagaaacaaccgcaaactgcagttgaataggagcggcttcggtaggagtgtgaggaaacaacgttaccctatacaaccgggcgacacgataaaaaagaatgggcaagaaaaagtagctaaaggaacattacactatggtcagtacgtgcgggtagatgataatgatggttactctgactggaaaacagaagatgtgaaagtggtaacgtatggtaaaggattacagttcaactaa

SEQ ID NO: 1632 - DNA, 324 bp, Unknown
  SL_8KL_010_SEDDRAFT_10000047 JGI
gtcaacaacccgcaccccagaggggtggggcttgaaaaagtcctaatacgcgggttggagattagcccaagcgatgtctcctcgaaggtggaggcagatgagctacgttcgggactgagtgttcgatatacaccccgggatgcccctcaagtcccgggcactggaagagtagagtggacgaaacacgtcacaatcccaacggcgtgcaacatcacctgctccaacacctgtcccaacatgggcgatgaggacctacctgtttgacataacagggctgagaacctcagcgtcaaaatatgtcaggaacgaaacatgagtaaaaaa

SEQ ID NO: 1633 - DNA, 1458 bp, Unknown
  Ga0137415_10000002 JGI
gtgataagtagtagtcaacttaagataacattggcgagagtgactaacaagtcccttacgggattattggaatttttgatggaaaagaaacagaataatggaagacgtatcgttatctcaaaatcaggtcgagtaaaagttaaaccaattacttttgttagtgtaattggaagtgatggtaaaccactaatgccatgtagtggcaaaagtgcaaggaaacttttagataaaggtcgtgcgaaggtaattcgtagagaaccgttcattattcaattacttgatcgaacacaaatcaattgtaaattacaacctacacaaattaaaattgatcctggtagtaaaacaaccggattagctatcgtgcgtgaagatagaccaaacgaaattacagttattcgtttaatggaattagaacatcgtggccgtgttattaaattaaaactttataatcgagctatgcatcgccgtaacaggcgttcgcgtaaaacacgttatcgtgaagctcgtttcttaaatcgtactagaccacaaggatggttacctccttctatccaacatcgtattgatagcacgatgtcttgggttaatcgacttagacgatggtttccaattactaaaattgtttatgaggatgttaagttcgatacacaactggctcaaaatactcatttagaaggcataatgtatcaacaaggtacattattaggatacgaacttcgtgaatatttattacttaaattcgatcataaatgtgcttactgcggaaatgggtgttctaaaggttttcaaatagatcacgtaattcctcgtagtagaggtggatctaatcgtttgattaatttagttcttgcttgcaaagagtgtaatcaaactaaaggtaataaaagttatcaagagttcttaaattttaatcaaattaagatagataaatttaagaaacaaatattaaaacctcttcgagatatggcggttatgaacgctatacgaaatgaacttagattagcacttattaaaactggtttattaattgaaactggaagtggtgggttaacgaaatttaatagattacgttttaaaatacccaaaactcatgctctagatgctatttgtattggttatatagttaaaatacatggatggattcataaaacattacatataaaatgtaatggtagaggtagatatcaaagagcaatacctgaccaatatggttttattaaagcttatatacctagacagaaatatttctttggattcagaacaggtgatcttgttcgtgtaagatcttctatcaaatctggtattaacccaccactttggtcaaaggtcagtcgtgtagtatgccgagcttctggtaagtttgtttttaaaataaatgaaaagatttatcaaccttcttatcgatactgtcaacgtgttcaacatatcgatggatatagttacataactgttatataa

SEQ ID NO: 1634 - DNA, 363 bp, Unknown
  Ga0137415_10000002 JGI
gtcactgtcgaataccttagctaacctcggaaaacattaaaaatggaaaaaagttcatccactccactttaatacgtgagttgtaagactagatgaatcagcctcagtatgaaaatactacgttattttgatgcatatcttggaatgcccactcagttccaagctctatggtcttatcattaaacaactctgtgagataggagtagtgtgataagtagtagtcaacttaagataacattggcgagagtgactaacaagtcccttacgggattattggaatttttgatggaaaagaaacagaataatggaagacgtatcgttatctcaaaatcaggtcgagtaaaagttaaaccaattactttt

SEQ ID NO: 1635 - DNA, 1191 bp, Unknown
  Ga0256842_1002984 JGI
atgccaattaaacagataaaagtttttgtagtggatgcagaagagaaaccgctgctacctactacacctgcaagggcaagaatacttctaaagaagggtaaagctaaggtttacagaatgattccctttaccattcagttaagcaaggttattaacgaccctgctggaaaatttactgcctctgttgatgatggagctaaatgggtaggaattgctgtaaaagggaaagatgaaattgtttttgtagctaatgtgagactcaggcaagatgtaggcagaaaagtcaaagaaagagcaatgtatcgtagaaacagaaggagcaggttaaagtatagacctgcaaggtttttgaacaggaagagagctaaagactggctaccaccgtctatcagatatagaaaagaagttgttttgagaatcctcaatgacttaaagaaatttctcaacattacggaagttgttattgaacaggtcagatttgacatttcttctcttgtagctggaagaaaacttgtaggagcagaattccaacagaaaagatatgaaggaagaagctttagagaaaaagttcttaaaagagacaattacacctgtcagatttgtggaatcaaagagaatcttgaagctcatcacataattccaaaaagcaaaggaggaacgaatcttgtagagaatggaattaccctctgtaaggactgtcacagagcagttcatgaaggaaagataaaaataactgctaatattcttttcttaaaagctccatcagcaattcagcaaggaaagtggtggttatacaggaagttaaaggaacagtttaaaaaagtagaaataacttttggttatctaacaaagaagaagagagaaaaactcaatcttcctaaggaccattatgcagatgcttgtgcaatgcttaactgcaatcatgtagtttctcctgtttatctcctccttccacgaagaaggagacctgagataaacaactccacaaagaagcatgaagaatatagaggattcagacactttgatcttgtagttgcttatcatagaactaaagggaaggtgatagggtgtgtgaggagtttaaagaaaagagggttagctttaagaactaagttttcaaataactttgtagttggatacacgaaaagcagactactctggagaccaaaagggttagtgtatgtgttgtga

SEQ ID NO: 1636 - DNA, 318 bp, Unknown
  Ga0256842_1002984 JGI
agttttcattacggtttggatgggtctgaggtggaggtagtcctgatgaaggataagctgaacctgccgaacaggaaggtaggaggtgaagaggagagggaattcctttcccgctacctacgttctgtagttgtccataaggacagacaccctggagtggagcaccagctccaggctctgttggtggtgggagacgaaactcagcctgagatggtgttggtgaacactctcatcactgttagagactacgggacttcaccgaggtgcagtttaacccctttatgggaggtagcttaaatgccaattaaacagataaaa

SEQ ID NO: 1637 - DNA, 1398 bp, Unknown
  Ga0209777_10021516 JGI
atgcagaagttacaaggaaagtttaagaacacaccaaaggatgcttcccaagtcccttgctctgtaaattttcaattaaacagagacgaaagtctcagtgctgagaataaagtactgacttgtaacaatcccgaagggaatctagtccagcatacaggacgctcattaaaagcaattgtgtatgtattaaacaaagagggaaaacccttaatgccttgtagttttgcaaagtctaaaagattggtaaaaaaaggaggcgcaaatgttgtaaaaagatttcctttcacaattcaaattaattttgaatgtaaggaagagattcagtccgttattttaggaattgatcctggatatcagaatgtaggtatttctgctaggactaccaagaaagaattgataagagtagaagtacagttaagaacagatatcaataaaaaacttacagaaaaaagaatgtacagaaagaatagaagaaacaaactttggtacagacaaccaaggtggtcaaatagagttgctacaaaaaaacaaggttggttggctccttctgtgcagcacaaattggattctcatataagattagtaaagagaatctgtaaattgcttcctgtatcaaaaataattgtagaagtggcaaattttgatattcagaaaattaataatccagatatttctggagtagaataccaacaaggctccttgctaggatatgaaaacagcaagtcttacttaattgctagagaaggaaagtgtcagttgtgtaataaagaatccactaaaggaaatccttttaaaatacatcatataatacaaagaaaagatgggggcactaatagcccttctaatctagctttactgcataaaaaatgtcatgataaattacatgagcaaggattaaaactaaaagcaagtaagcaatttaaggcagagacttttatgtccacagtaagatggaaaatagtagaagaattaaagaatcttcccactagtattacttttggatatattacaaaagtaaaaaggcaggaaagtaatattgaaaagtctcattccaatgatgcctttataatttctgagggaaaagaccaagaaagagctgtgtgcctcaatattaaacaaaaaagaaagaataatagatgtctacaattaaatagaaaaggcttccagccttctattagaaaacaaagataccccatacaacctaacgatttagtaaaaataaatgggaaaattgctctttcaggaggagtacactgtaaaggtaaaagaattattgtaaacggaaaaagtgtcaatataagtttattagataaatggaaatttaattttggaagttttatgggggcagcaattcctcccacatctaaagatgtgggtttccttgctgcgaatttatga

SEQ ID NO: 1638 - DNA, 259 bp, Unknown
  Ga0209777_10021516 JGI
gtcaactacccacgactaaagtcgtgggcttgtcaggtgactggtaacgtaagagttgattagggagcttaaaggaaactttatgcagaagttacaaggaaagtttaagaacacaccaaaggatgcttcccaagtcccttgctctgtaaattttcaattaaacagagacgaaagtctcagtgctgagaataaagtactgacttgtaacaatcccgaagggaatctagtccagcatacaggacgctcattaaaagcaatt

SEQ ID NO: 1639 - DNA, 1311 bp, Unknown
  human oral metagenome genome assembly, contig: NODE_138_length_60038_cov_8.947085, whole genome shotgun sequence WGS
atgacaaaaacactaaccaaacaaacaacgcaagcttgcgtgttagatcaacaaggtaaaccgttaatgccaacgacacgtcttggcaaagtttatcgccttttaaaaacacaaaaagctcatattgtgtcatatgaaccgttcacaatccaattggattatgaacctgacacacacattattcaaccgatgacactcggcgttgatagtggtgctattcattcaggttattctgtaactaataaaaaccgtgaatactatagtgctgaagtcatcgcacgtaataatatttctaaacgtcttttagatagacgtatgtaccgcaaaaatcgtcggtctagaaaaacacgttaccgcaaaccacgatttaaaaatcgtaaaaacaaaaaaaaaggttggttaccaccatcacttgaacaaaaagttgcagtacaagtaaacgaaattgaccacttacatcactattttcctattgaaacaatcattgttgaagtcgctgaatttgatattcaaaaaatcaaaaatcctgatattgcaggcattgaataccaacaaggaaccttacaaggttataacatccgtaactatcttcttgaaaagcatggacgcaaatgtttctattgtggaaaaagcgtttctaagttcgaagttgaacacatgataccaaaaacaagaggtggctctgatcgtattgataatctaaccttatcttgtcatgactgtaatcaaaaaaaagatacattgaccgcagaagaatttattcgacaaaccttaccacctaaaaaagcagctaaaaagttaaaacaattgcctaatgaaaaacgtctgtttaaatacatggcacacatgaacgctaccagatgggctttatacaatgctattgacgaaaaatatccaaatgtcaaaataacttatggctacattacaaaatacaaccgtattcaagcaggtcttccaaaagctcaccacattgacgctaaatgtattactgatttttcaaccgttccatctataaaacaaactgttattaaaataaaaatgcgtagacacaatcgtcaattacatcaattgactttcagcaaaggacatatacgcaaggcagcaagtttaccaacaattatcttcggttttcagttatatgacctcgtgttatttgataatcattattattatattaaaagccgtcgaagttcaggatcatttgaccttacttctatagaaggtttaaaaaatacaaatcgaagttacaaaaaattaacattattagcacatacaaatgcatatctaactaacagatacactaatgactaa

SEQ ID NO: 1640 - DNA, 343 bp, Unknown
  human oral metagenome genome assembly, contig: NODE_138_length_60038_cov_8.947085, whole genome shotgun sequence WGS
agctagatcaataaccacccactgaaatgggcggtttaattaacttctttacaatgagttaatcaaaccgtgattgattagccttagtttttttaaaactccgttacttgtaaatatataggtaccgtgggatatctgcctagtcccacgctctacgcgttattattaaatagttctgattggtaggaaccgtgtgataacgataaaaaactacaagataacattggcgaaggcaacaaagggtttgtttatacccgcttaccgcatcaaataaacaccaaatcaactagaaaggactttgtcaaaacatatgacaaaaacactaaccaaacaaacaacgcaa

SEQ ID NO: 1641 - DNA, 1347 bp, Unknown
  Ga0167622_1004112 JGI
atggttttcgtcctcgcaaaaaataaacacccgctcatgccgtgctccgaaaaacgcgcgcgcctcctccttcaacgtgggcgggcacgcattcacacgctctacccattcacgatccgtctcatcgatcgcactaccggcgttctgcaaccaatcgcgctaaaaatcgatcccggctccaaaacaaccggtatcgccctcttgcgagagcagtgcgaggacgccaatgtactgttcttggcagacctcgcgcaccgcggaagcgctatttccaagaagatccacgagcgagcagggtatcggcgtcggcgccgctccgcaaacctccgctaccgcgcgccacgattaaataaccgcacgcgaaaggcgggttggctcgcgccctcgctccagcaccgaattgacagtacgttctcgtgggccaggaaactccaagcacgcgcgcccatcacctccttggcgcaagagcttgtcaggttcgatacccaggtaatacaaaatgctgaaatctccggaactgcatatcagcgcgggaccctctacgaatacgaagcacgcgaatatatcttcgagaaattcggacgccaatgcagctactgcgacacgaaaacgggaccattgaacctcgatcacgtccaacccaaaagccgcggcggatcgaaccgcgtcgcaaacctcgtaccagcatgcatcccgtgcaatacatccaaggggagccagcctatagaacaattccttagccacgacccgcttcgactcgcacgcatccgtaaccagctaaagacgccccttaaggacgccgcggctgtcaatgctactcgctgggcgcttttccaagcactgtcaagcctcgcgctaccactccaagcgggaacaggcgggcaaacaaaatttaatcgtaaacggtatgacctgccaaaaacgcatacgtttgatgccgtctgtgttggcatgatggacaccgtcgtcacgatcagcaacagcaacagagcaattctcgtaatcacttgtatgggacgcgggagctatcaacgcacgcgcgtcaccgccaatggtttcccacgaggatatcttatgcgcggcaagcgggcgcgcggatttgctacaggcgatctcgttatagcatcggtaccaaaaggcaagcacaccggcacccatacgggacgcgttgccgtacgggcaacagggtcattcaatatacagaagagtaatgacgtccttcaaggcattagcgtacgacacgtccgccttctgcagcgcaacgatggataccgatattgtctctccccctccagcgaaaggacgccgctcctcctcggcctgaacgccgaggtctccgcagcgtaa

SEQ ID NO: 1642 - DNA, 284 bp, Unknown
  Ga0167622_1004112 JGI
gtaaactaccccggcctaaaggccggagctttctgaaagggacgctcatatttaccagggttggcgtgatgtagatcacgctccgttagagacaggtttaagaccgacgttgggatgcttcctcagttccaacctctcgaagttgcagtagcagacacgccgggtaaggcacgaaacggattgcaacaaaacgccgatctctaacattcccgaggggagcgagcccgcaaggctccgttacaaggctcttacgagcaaacacaaatagaaaggagtacgtcatg

SEQ ID NO: 1643 - DNA, 1323 bp, Unknown
  Draft_10008528 JGI
atgaaaaatcgtgttttcgtggtggatcgccaccacgatcctttaatgccgtgctctgcaaaacgggcacggctactgcttcaacgcgggcgtgcccgcgtccatcgtttcaaaccgtttactattcgcttggtcgatcgcctccaggcgtcgtcggcgctacagcctgttaccgtcaagattgatcctggtagtcggtatacagggattgtagtggctcgtggcgccgataggcgtttcacgcatctccatgggctgtttctgatggagctggagcatcgcgggctgcggatcgcagcagccctccgtcaacgagccgcactgcgtcggaatcggcgcagtcgtaaaacacgctaccggcctgtacggttctcgaaccgcactcgcccagcgggctggttagccccatcgttgcttcatcgagtccagtcgacattgacgtgggtgcagcgactgcaccgctgggtacctgtgaccgcattggcgcaggagctggttcgcttcgacacgcagcgcatgcagaatcctgaaatctctggtgttgagtaccagcaagggacgctactagggtacgagattcgtgagtacctgatggccaaataccggggctgttgcgtgtattgcggtcgtaatgcgaaggacgtagagatacagattgaccacgttcgaccacgggcgcgtggcgggtcgaatcgcgtgagcaatctcgtactggcttgttggcgctgtaatcagtcgaagggtgctcgacctgtagaggagtttctctcagggcgacccgaggcgctgaaaagggtgctagcgggactgcgtcaaccgctacgggatgctgccgcggtcaacgccacgcgctggtgcctgtaccgtcgattactgggaacggggctccccgtccaaaccgggagcggtgcccaaacgaagtggaatcggactcggtttggattaccgaaaacccatgcgttggatgcgttgtgtgttggagaagtggtatctgtggcagatacaccgggccatgcgatgccggttcaatgcgcgggaaggggactttaccagagaactataacggaccgtttcgggttcccgtcgcggcaccggatgcgccagaagcttgtttcaggcttcaaaggtggtgacatttgctctactgtcatttcactacgtagaccaaaagcgatgttaggacacatcaccctgcgcctaaggggcgttttcagtttttatgacatcagtagtaagcttcctcacgatcgtaattttaggtttttgcgtagagttgcgatcagtgatggatttcgttattttaccaagaagggagatctgtga

SEQ ID NO: 1644 - DNA, 298 bp, Unknown
  Draft_10008528 JGI
gtcattcatcgtaaataaaaaggagattcacaatgatcaaagttggtatcagcttccaaacctaagcacttaaggaagccagactcagtctcccgtaaaacggaggctacgataccccagaaataggtaccggcggatgcctcctcagtccgccgctctacggctagtcattaaacagctctacgggtttaaggcagtgtggctagcgccaaacctggggatatctttgtcgagaggagcccggctctagaagccggcgtcacatcgttccgtaaggaaaacccacatgaaaaatcgt

SEQ ID NO: 1645 - DNA, 1251 bp, Unknown
  Ga0315284_10052402 JGI
gtggttctcggccctaaaggcagcaaaaccaaggagattttgaagttggtatatgtagttaacaaaaatggaaaccccttgatgccttgtaaggaggcaaaagctaggcatctgctaaaaagcggtaaggctagagttttacttaggtgcccttttacaatttgtctcaattgggaatgcgaagagggtgtacaagaggttgtagcttcactgataacaagtagtagtgaggtaggagtagctgttaagcgcgatagtggggagtgcctttacgctgctgaaatagaactcagacaaaacgtaacaagagctaccgttcaaattgtaaaaggtaaaaagaagaaagtttcacgaagaatgcagtataggagaccacgtaggaatagaaaaactaggtatagacagtgtagaaataggaatagaactggtaactatcgtcaaaagtattcgccaacacttaggagtaaaattgaagggcatgagagagaagtacgtagggtagaaaagctgttaccagtaacacggtggttagtggttagaggtgcaaaggttgaaggccattttaaggatggcagtctggaagaacagtggttaaatgttcagcgacaggtgtttgagagagatggtttccggtgtcgtcactgtaaaaaaggtaagagagaacttcatgctcaccatttagaagcacgtaaggatggcggtcttgatactctagaaaacttagtaacgctgtgtaaggagtgtcatggggattatcatcgaggtcttatatctttaaagataggtaaacatacttataaaggtaaagttgatacagaagtagctataataagaaagaatttagtggtggaaaagtcggaagacgtttacggctttcaagtaaaagctaaaagaaatgcactagaactatcttattcaccacttaatgatgcttgtgcggctcttaatgttaaaccatcgactaatgtttatggtattaggtgtatccctagaggggattaccaaagaactcgtggtcgtcactctcaacaagtagttcctaaggggaaaataatgggttttaaccgttttgataaggtacgatatttgggaaaggcactttttattaaaatgcgaatgagtacggggtattttaaattaacagatataaataataaagatataccaaaagtaatactaggaagaaaactgaagcttttaggaaggagaagatcctgtcttattgctttgaccaccccaacctccccctaa

SEQ ID NO: 1646 - DNA, 328 bp, Unknown
  Ga0315284_10052402 JGI
gtgaacctcccctccctaaagggaggggcttctgaagtgatttaggagggtaacaggttcaccagactcggttctaagaaattagaactccgttatttagcatgtagaaaccctagaatgccgcctcagttctaggctctttcgtggcactgtaaacagacttggttttctatggaaaaagaaacgtgagtcagtcaaccacaaggtgaaggctaaataacattgtcgagaggaagtccgtggtttttaggtggttatagtctaaaaacaggcataacgagtggttctcggccctaaaggcagcaaaaccaaggagattttgaagttg

SEQ ID NO: 1647 - DNA, 1314 bp, Unknown
  Ga0207193_1000837 JGI
ttgcatagaaaaacagtaaaaccatcaaacagtgtgtttgttctgaataaagacaaacagcctctttctccctgtcaccctgctagagctagggagttgttagacaagaagaaagcatcagtctttagactttatccattcacaattatactcaaaactcaaaagaagaacccaaagtttcaagatactagggttaagatagacccaggttctagaactacaggcatagctttaatcatagaaggagagaagaaagggtggtttctaatttgggctgcaaacctagagcataggggtcatgctatagttaagaaactcatctctagaagacaacaaagaagatctagaagaaacagaaaaactaggtacagacaaccaagattctcaaacaggaaacactcaaaacccaaaggttggcttcctccttctttactttctagagttaacaatgttacaaccattgttaagagaattcagaagttctgctacgttgaatcctgtactgtagaaactgtgaagtttgacacacaaaagatgcaaaattctgagattaaaggaattgagtatcaacaaggagaactacaagggtacgaagttaaagagtatcttctagagaagtacaagagaacttgtatttactgtggaaaaactgatgtaccactagaagtagaacacattgtacctaaatctaaaaatggaagtaacagagtttctaatttagcgatagcgtgccacttctgtaatcaaaagaaaggaaataagaacctagaagaattcttaaagaagaaacctgatattttaaaatctgttaaaagtgagttaaagaagagtctatctgatgttgctgctgtaaactctactagaaagaagataaaagaagagttaaagaagctaataatagaaacttctttctccaaaggatacattacaaaatacaacaggcttaaacaaaaatacaagaaagatcactggatagatgcagcttgtgtaggaaagtattctggaattgaagtgtttattcctaaaaggtttaaacctataataataaaggctaatggaagaggccatcgtagattctgctctatggataaatatgggttccctaagtctaaacctagacagagaagaaaacagatagagggagtacaatctaacgatacagtgagggctactcacaagaaaggtacttttgtaggcagagtaggattgtctaacgaccaatttacaatgaaagtagaaacagggtacattagatttaatgctagcgactgtaaaattctacacaaggaggatggatatgtttatagtgtttaa

SEQ ID NO: 1648 - DNA, 333 bp, Unknown
  Ga0207193_1000837 JGI
attgattataatgatccaaaaaatcacttacctttaaaaagggtcacttaccaaggggcaagccccttggcttttgaccagactcagtgcatctagatgcactacgttatgagagaatatataggtactagtgggtgcttctccagcccatctgctctacgcttggattttaaacagatatgggagatatatgtttagcaacgttaactcttatgcagtgagttcaagatacaaaacctctcattaacattgtcgaggagaacttaacagctacgtgctagatttaggaggaatcctaccttgcatagaaaaacagtaaaaccatcaaacagt

SEQ ID NO: 1649 - DNA, 1020 bp, Unknown
  Ga0180732_1000047 JGI
atgcagaagtctgtaccagtgatcagcgcgacagggaaaccattaatgccgactaataattatcgcgcgaacgaactgataaaaaagaacagagcaaaacgccgtttcaaggctgggattttttatatcaagttaatccagcgtactgatggtgtaacgcaggacattgtggtaggaatcgatcctggcagcaagagagaagcgttcacggtgaaatcagaattacatacttacttaaacattttaagtaattctgtttcatgggtaaaagaagcggtagaaacaaggagaaacgcgagaaaagtacggagatataggacaactccatgcaggaagaataaaaacaatagatctcaaacaacctttttagcaccaagtacaaaagcacgttggcaggcgaagttaaggattgcagtcattctcgcgaagttgtttcctattaagacatttgtagtagaagatataaaagcacctacatttaagaacgctaaaagatggaatacatctttttctccactcgaagtcggtaagaagtggttctataaagaacttgaaaaaattgcaaaagtagaattaaaatctggttacgatacataccaaataagacaggagttaggacttataaagacaggtaataaatcagccgaaattttttccgcgcacaatgtggactcttggtcattggcttggagttcagtgcgaggtggtactgttccagaaaacaaagaaattacaagattaattccaattcagtttcacaggaggcaacttcatcgttttaatttctcaaaaggcggcataagaaaagattatggcagcacaatgtcacttggattaaaacgcggcagccttgtaacacatcctaaatacggtatttgttatgtcggtggcagtagtaaagatagattaagtgtgcataatttagagacaggagaacgattagctcaaaacatagataagaaggatttagtatttctttcttataattactggaggacgacaattcctctgcacacataa

SEQ ID NO: 1650 - DNA, 232 bp, Unknown
  Ga0180732_1000047 JGI
gtcaataacccctatttaaaaataggggcttgcgaaagagaagaccaatcatcttagcaggttaaacaattgactacacagctagtaactgaattctctgagcgtggtagctcgaaaagatgtaaagaatgcttcccaagttcttttcctctctgagagtcagtgtggatgggagaaattgtagtaaggttagggtaacttaactaaataataaggagtaataaatgcagaa

SEQ ID NO: 1651 - DNA, 1362 bp, Unknown
  Ga0256404_1003517 JGI
atgccgaaaccagtattcgtaatagcttctgatggcacagcattgatgccaaccttagctgtaaaagctagaaaactactaaaagccaaaaaagctattattgtaagctacatgccgttcgccattcagcttacatatcaaagtggacacaacacacagccggtggagatttgtatcgacacaggctcggaacatatcggtgtttccgtaaaatcagagaagcatgaatatcttcatgcgcaatttgacaacctcaaggatgagaaacaacgacacgaagcaagagcaatgtatcgtcgcacaagacgaaacagattgcgttatcgcaaaccacgattcaacaatcgaggaattccagaaggttggttagcaccaactgtggagcataagaaaaacaatcacatccagattatcagcaggcttgtaggactcatcccagtgaaagacatatacgttgaggtcggacaattcgatacacatcttatgcaagctcttgagcaaggaataaagcttgaaggagaagattatcaacgtggattgaagtatggtcttgccaacacgagagaagcagtattcgtcagagacaactatacttgccaatgttgtgggaagagtgtaaaagatggagtaattctccgcgtccaccatatagtccatcgaagcaacggtggtagcgattctgctagcaatctgctaacaatatgtaataaatgtcacactccgaagaatcacaaacccggcgggaaattagatggtctaaagcccaaaaattcttctctgaaagatgcaagcttcatgaatgtcgtgcgttggtatattgtcaatgagcttaaagaaaaattcccaggaataggaatccacacaacttatggaagttacaccaaagcttcaagaagagctttaggtcagatagaaaaatctcacgccaacgatgcatatgcaatgggcaactttcacccatcacacagaacacacgaatcagttatcaagaaacatagaagaaacaacagagtcttaagtatattctacgatgctaagtatatagattcacgcaccggagaagttaaaagcggaagcgaattagcgtgtaacagaacaaatcgaagcattccaagaaacaattcgaacaacgagcgaatcttcagaggagataaggtttctaaaggaagagtttccataagaagaaggcattacgaaatacaaccaggggatatattaacttacagaggaaagaaatactcagcagtaggagttcattgtaacggcacaagagtaattttagagacaaagcaatccattaggataacggatttacatattaaaagaaagaaaggagggtggcaattcctctccgccctatag

SEQ ID NO: 1652 - DNA, 341 bp, Unknown
  Ga0256404_1003517 JGI
gtcaaccacccaccacttaaattcctaatggaatcctgaagtgggggcttataagccaagcccagttgattagcctcagtgtttcgagaactacgttatgcagtgatgcttaagcaacttacccaggaatgctccacaagttcctggctctaagggtatgtattaaacatctctgatgggtaggagaagtgtgcataccttcaaaacatgcataacattggcgatgtggaccaccctgcatttggcaggagaatccagaaagggcgtaagctctcctggaaggtgtagaccagggcgaaagcctgaaacttaaagaaaggaggcatcaaatgccgaaacca

SEQ ID NO: 1653 - DNA, 618 bp, Unknown
  human gut metagenome genome assembly, contig: NODE_911_length_18023_cov_19.4281, whole genome shotgun sequence WGS
atggaaaaacgccggcagcaccggcaggcatccagaagaggagaacaccttgcgaggaaacggctggtcaggagactgggaaccacgatggggaatatcctggaacggctgcttcctggctgtgaaaaaccagttatggtgaaggacatcatcaatacggagtcccgattcaacaaccggcgccgcaaggaagattggctgacgccaacagcaacacagctgttaagaacacatctgaacctggtggaaaaggtatgtcggatccttcccgtcagcgggattgcattggaggccaaccggtttgcatttatggaactggaagcaggcggccatctggaatccggagtggattaccagtgtggacctctttacggatatcgcagtattcgtgaagccctggaagagcttcaggatggaagatgtcttctgtgcggcgaacgtgccattgaacatgaccatcacctggttctcaggtcaaagggtggaagcaacactctggcgaatatggccggcttatgcgaaaaatgtcatacgctggtacatacgaaccaagaagctgcggagaaactggaagccatcaaggcagggagcttctcatttggaaaagcttctgcatag

SEQ ID NO: 1654 - DNA, 211 bp, Unknown
  human gut metagenome genome assembly, contig: NODE_911_length_18023_cov_19.4281, whole genome shotgun sequence WGS
gtcaactatccatccgctaaagcgaatgggcttgtaaaagcccagagactttacaggtgagcagttgagcagaaccgtgacgcagcaggttcgccttatcactccgggatgacgccaagtcccggacactgagatgtggctgcgcccaggttatgacaacactacagggacatgttccctggcttatagcaaaggagatacaatgaactat

SEQ ID NO: 1655 - DNA, 309 bp, Unknown
  Ga0255345_1013787 JGI
atggtatatgtattaaaccaagacggacaacctcttatgcctactaataggcacggtaaagtaaaacacttacttaaaagtggaaaacctacaggaaagattaaaggttttaaaaaattcgataaggtttcgtattttggaaaggaatatattatcaaaggtcgtatgagcagcggatatgctattcttatggatgctgatggtaacaagatagacttttcagatatgccgaaaggctataagacaccgaaattaagtaatcttaagagaatttctgctcgtaggagtgtgataacaacaatcgcttag

SEQ ID NO: 1656 - DNA, 302 bp, Unknown
  Ga0255345_1013787 JGI
atggaatagccctaacttatacgcctgtggacattgtgtaagacattgagttgcgtatcatcgtagccaatgcagtagtggttgaagcaggaagctccgacttcaaatgcgtagcattaagtcggagtagttcacgttaggtcagagtaattatagccttgtgatgtatgtgtaaaaagtctatctatcattgtcgagagcaagaacgattctgtatatggtaacagtatacagatagtcgcaaccactacataagtagtggcattatgtattaagttacatagaaaggagtgccagttatg

SEQ ID NO: 1657 - DNA, 1023 bp, Unknown
  Ga0376497_007558 JGI
ttgcatagagaactaaagaccaacggcgggatgcttcctcagtcccgtcctcttgaagcccgggttgcagaaggccttgtgtcatcccattgggacaacctacaggggtgtggacgaaacgggtccgggcatacagccgctgtgcaacaatcccgaggggagagttcaaccgatgccagggttgaaccgtcacccgcctttgcggtgaacggcgtaagccgtgtttttgtactcgacaagaacggtgacccgttgatgccgtgccatccggccagagcaagaaagtttctggcacggggccgtgcccgggtccaccagatgtttccatttaccatcagactcgttgaccggatccgggagaacagtgatgtgcagccggttaatgttaaaattgatcccggagccaaaacaaccggcatggccgtggtgagacaggatggtggccatgcccaaatcctgcacctgtcagaactgacacaccggggcgctgtcatccggaagaaactggatcaaagatccaattaccggagaaggcgaagaaccgcaaacctctggtatcggaagaaaagattcgacaacagaacctggcccaaagggtggcttccgccaagtctcagatcacgggtggataacactttatcctgggtgaaaaagtatcaaaggatctgcccggttacaggcattgtcctggaacgggtccggttcgatactcagaagctgcagaacccggatatttcagggatcgagtatcagcaaggcacactgttcgggtatgaggtaaaggaatacctgcttgaaaaattcaaccggacatgtgcctactgcaacggcttgagcaaggatccggtcttggagattgagcatttcatccctcgcaatccctcaaaaggggataagggatcaaaccggatcagtaacctggccattgcctgtaaaacctgtaatcaggaatcaaaaaagaacctgcagccggcagattggatcagccttttatccaggtcacagaaaaagatagatcaggtc

SEQ ID NO: 1658 - DNA, 219 bp, Unknown
  Ga0376497_007558 JGI
gtcaactaccccggcctgaaggccggagcttgtaaaaggctccacggttgaccagggaaatgttcaaagttttatggcaaagacaaaaaaggagaacattagaagttgcatagagaactaaagaccaacggcgggatgcttcctcagtcccgtcctcttgaagcccgggttgcagaaggccttgtgtcatcccattgggacaacctacaggggtgtgga

SEQ ID NO: 1659 - DNA, 1221 bp, Unknown
  Ga0247608_10001764 JGI
atgctgaaggacggacgggcagtgatagtctcttatgagccgttcaccatcaggctcacatatgagcctgaacacaagtatgtcgagaaggtaattctcggagtagacactggaagcaaatatgtcggactgagtgctgcaagtgatgagaatgagtatttctgtgcagaagcacagatacgttctgtcgaaatcaaggaactccttgatgaaaagagaggttgcagaagacaaaggagaacaagcaagctccgttacagaaaaccgaggttcaataacagggtttcttcaaagaaacccggatggcttccaccgtcagtgactgcaaagatgacgagccatgtacagttgattaaacttgttgaaaggattcttcctatatcagagattgttatagagaagggaaagttcgacacacacaaactgaagaacccggatgtatccggttctgactatcagcacggaaagaaagaatggtttgagaattcaaaggcattcgtcaaatacagagacaattacaaatgtgtatgctgcaagaagaaatccgcaaagaacagaaaacttgaagtgcatcatatactttatataaatgatgggggttctgatgacccggacaacctggtgacattatgtcaccagtgccatgagaaaatccacaagaataaactgaaacttccgaggaagttcaatgcacgttcaaagacagtcaaatctctcagggatgcagcatttatgaatgcaatgtcggacaaacttgtcgaacttgtccgtgcggaattcccacacgtcacagtgaaaaccacatacggttacatcacgaaaacaaaaagagaaaagatggggttgttgaaacgacattcaaatgatgctttggcaatcactggaaacttgtcagccaagccgtatagccggcttgtcagaataaaaagagtacgcagacacaaccgcaagatattcaatgtcagaatattcaagaaaagagtcaggaaaagaaaccagagtgatgtcaagttcatcggaggtttcctccggtgggacaaagttctcattaaagaaaccggtgttaccggtttcataacaggacggatgaagaaagaaaaacatgcagtagtctgtaatatggacggagagaaattacatgagaaaagcactattgctatgtggaagattaaactgttaaagcatgcaaacggtatgctttatgaagaaacaaacatataa

SEQ ID NO: 1660 - DNA, 301 bp, Unknown
  Ga0247608_10001764 JGI
gtcaccaaccgccgggtctgaagaacccgcggcttggttccactgcggaaccgtagccgagtgaacagcctgagtgaaaggactgatgtccttgaactacgttacccaagaatatataggcaccgtcgggtgttcgttccagccttatgcactgcgtccggctgttaaacaaaaactcttgcggaagagtgtgcagccggaatacaaaaccttgggataacattggcgagggacaaccataggattctaaatcctacattgcaattaattttgctaaattaaaatcaagtttgaaatgtac

SEQ ID NO: 1661 - DNA, 1347 bp, Unknown
  human gut metagenome genome assembly, contig: scaffold82971_2, whole genome shotgun sequence WGS
atgtgccggcttaccgctttaaacatatcatacagaaaggaagtgccttacatggtatatgtgttagatatcaatggacagcctcttatgccgactgcaaggcatggaaaagtaagaaggcttttgaacattcatcttgcaaaagtggtgaaacgctgtccatttacgatacagcttttgtatccaaatacaaaagaaacacagcctgtatctcttggcgtagatgcaggaagtaaacatattggtctggccgccacaaccgagaagaaagtcatttaccaagaggagctaattcctcgcaacgatgttgtaaagttgttgtcagcaagacgaactttacgccgttctcgaagaagtcgaaagacgagatacagaaagccaagattcaacaatcgtgtgcattccaaacataaaggatggttggctccatctgtagaagtcaaaattcaggagcatatcacagctatcaaaaacgtctgcaagattcttcctgtgtctgagattcacgtagaaacagccgaattcgatctccagcgtctgaaagcaatggaagaaggtaagcctttgccagttggtacggattaccagcttggagaacagtacgacttctacaacacgagacagtatgtacttcatcgagacggatacacctgtcagtgctgtgatgcacatgataaagatgtcaaactgcatgtacatcatatcgaaagccgtcagacaggaggtaatgctccgaacaatctggttacactttgtgaacactgtcataaggcacttcatgaaggaaagattgagcttcccaaaaataagaaaagaggcaaatcccatcgagatgccgcctttatgggtatcatgcgtaacactttgctggaacgtctgaaaaaagaagtagatgttccagcaacgatgacatatggatatatcacaaagtactggagagaaaaggcaggcttagagaaaagccatatcaatgatgccatctgcatcagtaagcatccatatgccaaacctttggatgcctactatctgacgaaagccgtacgacatcacaatcgccagattcataaagccaacttcagtaaaggtggtatccgtaaacgaaatcaagcaccatatcttgtaaaaggatttcgcctgtttgataaggtctcgtatcaaagtaaagagtatttcatctttggaagacgagctacaggcttctttgatataagaacgctggatggaactaaagtaaacaaaggttctgtcagttataagaaattgaggattcaggacacagcaaaagcatatgtaaaggaggtgcgagcaattcctcacatgaatgaattcacgtgtgtccttgcatga

SEQ ID NO: 1662 - DNA, 279 bp, Unknown
  human gut metagenome genome assembly, contig: scaffold82971_2, whole genome shotgun sequence WGS
ctgtcaactacccgccaataaattggcaggcttgtaaaagcctaagttgactagcctaagtgcttcgagcactccgttaagagagaatatatagttacccgtggatgtaacacctagtctacggctctaaggagacacattaaaccgttctgtgaggtaggaaccgtgtgtgtcttattgcaaacctctcattaacattggcgaaggtgtcatttacggctcgatatgtgccggcttaccgctttaaacatatcatacagaaaggaagtgccttacatg

SEQ ID NO: 1663 - DNA, 1449 bp, Unknown
  Ga0315282_10018675 JGI
atgcagaagttaaggaagagaaatacatacacacctacggttattccgcaagatcgtagcaactgtggcttgtcattaaacagagaggaaactctcagtgtggcaggctcaaaaacctttcttaacaactccgatgcggacctaactccgaaagaaggtcagaacttgagagtatctgacaaagtttatgttttaaacagaagggaacagccgttaatgccttgcagtcctgtaaaggcaagattattgttgaagaagggaaaggcaaaggtagtaaagagaacgccttttactatccagttggtctatgctacaggtgaagcaaaacaacctgttactcttgatgttgatagcggctataagcacatcggcttatcagcagtaacagataaaaaagaactatttagttcagaagtgcagttaagaaccgatattgttaaattgctgaaggatcgaagccagtaccgtagacacagacgaaacagattgtggtatagagaaccaagattccttaatcgtaagaggcctgaaggctggttagctccttctatccagaacaaactggatgctcacattaaggttatcaaccaggttaaagcaatactgcctgtatctaagattaatattgaagtagctacctttgatacgcaaaagatggtcaatccagaaatcagtggcgttgagtatcagcagggtaaactgcaaggctatgaagtgagagaatatcttcttgagaaatggggtaggaaatgtgcgtattgcggcaaaaagaatgttcctcttgagatagagcatattattcctaaatcaagaggtggaactgatagagtagataatttggcattagcttgccatgagtgcaaccagaagaaggacaacatgactgcagaggagtttgggcacccagaagttcaaatgaaagcgttagagacgcttaaagccacagcctttatgaacatagttcgatggaaactggttgataagctgagggagtcaggaaacatagttaatgtaacttatggatacattacaaagagtaacaggattgcattaaaaattcctaagtctcacataaacgatgctttcgtaatggcaggtggaagtaatcaaacaagatctaacgttcaatatttcatcaagcaggtaaggaagtgtaacaggagtttattcaaggcaaacctgcttaaaggaagcaaaagaaaagtgaatacgataagagaagcgtttggctttcatagatttgacaaggtactgtataacgggatagaatgcttcatatatggattaagaagcaagggttattttgatttaagaaaacttgatggaactaaggttcatagttctgcaaaggcaaaagaatgcactctgattgagtgtgcacacacgtttttaacagaaaggagaatggctctcctccccaaccttaaaagtggggtctccgagccataa

SEQ ID NO: 1664 - DNA, 259 bp, Unknown
  Ga0315282_10018675 JGI
gtcaactaccctcacttaagaaatgagggtttgcatcgtgagatgcaacacaagagttgataaggaggcattgaacatgcagaagttaaggaagagaaatacatacacacctacggttattccgcaagatcgtagcaactgtggcttgtcattaaacagagaggaaactctcagtgtggcaggctcaaaaacctttcttaacaactccgatgcggacctaactccgaaagaaggtcagaacttgagagtatctgacaaa

SEQ ID NO: 1665 - DNA, 1014 bp, Unknown
  Ga0315288_10049882 JGI
gtggaaatggtaccagtagtagataaacagcaaaagccacttatgccttgctccgaaaagagagcacggcaaatggttatatctagaaaggcgactcctttttggaaaaagggggtcttctgtattcgtctaaatgtggaaccttcagccagaaatttgcaacaagtagttgttggaattgatcctggatcaaaaaaagaaggtctgacggttaaatcgaaggcacatacttatcttaatgttcaagctgatgccattacgtgggttaaagaacatgtgaagctaagacgtataatgcgaaaagctcggcggcatagaaaaacaccttatagagagtgtcgaaataatcgcactatgaattgtcttccaccttcaacaaaagcgcgttggcaatggaagttaagacttattacttggttttcagagatgtacccaattactgattttatagttgaggacgctaatgcaattacaaaaaagaattgctctaaatggaatggtaacttttctcctataaaaataggtaaaaattggttttacagtcaaataaaaaaatttggaaatctgagtcttcgtaagggttgggatacaaaaactttgcgagataaaggtggacttggaaagagttcaaataagatgagagactcctttgactctcattgtgttgattcatgggttttggcaaatgaaattgcacaaggacacacaaaacctgaaaacaagagagttctttgtgttgttcctttgcgatttcatcgtagacaactacataggatagtcccgtctaaagggggtaaaaggccaagttatggtgggacaagaagtttaggtttaaaacgtggttctttggtacagaaccctaaatatggccttgcttatgttgggggtagttcgaaaaacagaattagtcttcattctttaagggatggtaaacgtttaagtacttccgtaaaggtaagtgattgcaaggttttatcttttggtggtactagagcctattgggctgaggtgtga

SEQ ID NO: 1666 - DNA, 247 bp, Unknown
  Ga0315288_10049882 JGI
taaaggacacgcataacatctgaactactttaagtaagaagctagcccttctgaaaaaggcagagaaaggtaaactttctaggattagccaagattaaaaatcaactagccatctagagttggcaactcaagaacacatgaagaatgctaccctagtttttcttccctgtgatggtcagtggcgaagggttgtataaacaaggtctgtaaagacaagatgtaaattaaagagaaagtagtggaaatg

SEQ ID NO: 1667 - DNA, 1359 bp, Unknown
  Ga0180435_10000153 JGI
atgcaaagagtattcgtacaatctatcgataaaaagccgttaatgccgtgcgctcctgcgcgcgccagaaagctgctgtcgtctggtcgtgcgcgcgtggtacgacgctatccatttaccattcaactagaacaggcgaccaccaacaatacgcaacctgttcgactgaagctcgaccccggctccaagaccacggggatttcattagtggcattgttcgaaaatggcttccgcgtggtttgggcggcgaatttgtcgcatcgaggccatactgttaaaaagaatcttgatagtcgccgcggttatcgccgtggtcgtcgtagtcgcaacctgcgctaccgaaagtcacgctttttaaatcgcggtggcgataaatcaggatggctaccgccatcactgatgtcgcgtgtacataacgttgaaacctggtcaaagcgcctcaaaagcttctcgctcatcactgcggttgatgttgaaacggtacgttttgatacgcagctaatgcaaaacccggatattcagggtgttgagtatcagcgcggcgaactggtcgattgggagttgcgccagtacctgctttaccgacacaagcatacttgcgcttattgcggcggtttaagcaacgacccaattctcgagcgcgagcacattcatccacgctcgaaaggtggaagcaaccgactatccaatcaagtgattgcttgtcacacctgtaacgatacgaaaggcaatttactgcccgagcagtggttgtcgttactcaatacatcaagcaaaaagattgatcgtgttcgcgctgacaactttaaacagattgttgcgggacagagaccaagcctgcgcgataccggcgcagtaaacgccactcgttacaaaatcggcgacgtgttgaaatcgcattttgaccaggtcgaattctggtccggtggccgaaccaagaaaaaccgctctgatcagggttatcggaaagatcactggatcgatgccgcatgtgtcggcaccagcggtggctccgtatttatccctgaaagcctgacacctctgctgattaaggcgcaggggcacggctcacgccagttcaccaagccgaatgcctcgggttttccaagaacatcggccaaggcgcgatcaccttttgttcgcggctttaagacgggtgatctggttaaggcctcagtgccgactggtttaaaggctggcattcacgttgggcgggttgctgtaagaaaaaccggctcttttaatatttcaacaaacacaagtaccgtgcagggaatcagtcacagatactgcgaaaagattcattgtgcggatggttataactacaactttggaggcgcgcttcctccccacggataa

SEQ ID NO: 1668 - DNA, 288 bp, Unknown
  Ga0180435_10000153 JGI
gtcatctaccccacggttaaaaccgggggcttgaaaaagcccggatgaccaggctaaggccagaacatttttcgaagatgttttggactacgttggaaaagtcacgacaccctggaatgcttgccagttccaggctctgtcgctaaagattaaaagcccgttaggggtattgggcggtgtctttagcacgacaagcctttccaacattgccgaggcaaacaaactcatcttcggatggagaaccggcgggtaaccgcctaacttaaccaatggataatgatgcaaaga

SEQ ID NO: 1669 - DNA, 1320 bp, Unknown
  Ga0070738_10016471 JGI
gtgtcaaaagtctttgtggtagatgccaaccagcagccactttccccggtgcatccagggcgagcacgagtgctgcttacgcggggaaaagcggtagtgtttcgccgctacccgtttaccatccgcttgaaaaacgcgccgctttctccagaggttgctcctctgcgcttgaaaatcgatccaggcagcaagaccacgggaatcgccctgctcgacgagacgacaggagaagtggtcttcgcggcagaactggcgcatcggggggatgccattaaacaagcccttgatcagcgtcgggccgttcgtcgaggacgccgacagcgcaaaacgcgctaccgaaagccgcgctttgccaatcggcgacggcgcgaagggaagctggctccctctctgcaaagccgagtgagcaacgtcctgacctgggtccagcgtctcatgcgtctgtgtcccatcacggcgctgagcctggaactggtcaagttcgatcttcagcagatggagcatcccgagatcagcggtgtgcagtatcagcaagggacgcttttcggctatgaagtcaagcaatatctgctggaaaaatgggatcgggcctgtagctactgtggaagaaaggatgtgccgctgcaagtggagcatatccaggccaaagtcaatggaggcaccgatcgggtcagcaatctctgtctggcttgtgatggctgtaataaggccaaaggaacgcaggatatccgagcgtttctggccgaaaagccggagctgcttgcgcgtcttctggctcaggccagggcttctctcaaggatgctgccgctgtcaatacgacccgatgggcgttgtacgaatgcttactggctctgggcttgcccattgagtgtggctcaggtgggctgacgcagttcaaccgaaggcagcggggattgccaaagcaacactggattgacgcggcctgtgtgggcaagagtactcccgttcaactcaagctggctgcgatcctgcctctgctcatcagcgcgaccgggcatggcagcaggcagaagtgcaatgtcaacaagatcggcttcccttgctccaaagccaaaggagccagaaaggtcaagggctaccagacaggggataccgttcgggctgtcgtcaccacaggcaccaaacaaggtatctatgtcggacgagtgcttgtgcgagccagtgggtcctttgacatccgcacgcgcagcggtcggatccagggcatcagttatcgcttctgtacgcccattcaccgctgcgatggctatagctatcaacaaggagtagcgtatgcacagcataatcccgcccaataa

SEQ ID NO: 1670 - DNA, 312 bp, Unknown
  Ga0070738_10016471 JGI
gtcatgaacccccgcataaattgcgggggcttgcagacagagtttgctctgtggcaagccctgaacatgaccagactcagccagagtcttccctttggtgggaaggctaccgggctccgttaggagcgaaagcataggtacgtccgggtgcgaggccagcccggaccgctacggcaagcagttaaacaggtctagtgggttaagccagtgctgcttgcatctgaaaccgctccataacgctgtcgaggccacctttacctgggaaaccagaggcccgcaagggtagaagcaaaggaagcaatcgtgtcaaaa

SEQ ID NO: 1671 - DNA, 1359 bp, Unknown
  Ga0114918_10012039 JGI
atgcagaagttagggaaaaagctaaagaacgtacctatggatacttcacacgtccatagctctataagttcttctttaaacagagttcaaagactcagtgagaagaacatgtgctgttcccataacaatcccgaagtgaatcaacctcaatgtaaagaggggcagaacttgagagtatctaccaaagtttacatattgaatatgctaggtaatcctttaatgccatgtagtccgagaaaagcaaaaaaattattaaaagaagggaaagtagtagttgtcaaaagatttccattcacaatccaattgttaattccaacaggggaaacaaaacaaaaaataacattaggaattgattctgggtatatgaatattgggtttagtgcagtatcagaaaaagaggaattagtatctggtacagttaaattagatgaaagaacatcagaaagattaacagaacgtaggatgtatagaaaaattagaaggagcaaactttggtacaggaaatcaagatttttaaatcgctccaaaccaaaagactggcttcctccatctatacaaagaaaatatgatgcacatttgaatcttattaacagaattaagaagattattcctgtttctgaaacaattattgaagtagcaaatttcgatattcaaaaaattatgaaccctgatatttcaggaacaggttatcaacaaggttctctatatgaatatcagaatatcagaagttatttaatgaccagagaaaaaggaaaatgtcaactttgtggtaaggattttaaaggacagtcaagtcatatacatcactgtaaacaaaggaatgagaatggaagtaatagacctaaaaatcttgctattttacataaggcttgtcataaaaaactgcacaagaaaggattgaaactatctaaaccaaaaagctataaaccaaatacatttatgtctatcatacataaaagattttggcaggatgtagatgatttacagataacttatggatatgaaacatttatcaaaagaaatgaattaaatttggaaaaaactcatagtactgatgcttttgtaatagcgaaaggtactattcaaaacagatgcaatgaacaaattatacaacaaaaacatagaaataatagagttttacaattaaacagaaatggattcaaaccttctattaaaaagaaaaaatctaaagttaatccagaagatttgttttgggttaatgaaaaacagtatatttgtaaaggtatgtttaataaaggacagtatatcacttatggaagcacaaaaaagaaagaatactttaaattttctaaagtagaaaagatatatcatcaagggagttttgcatggaatatataa

SEQ ID NO: 1672 - DNA, 266 bp, Unknown; identical to SEQ ID NO: 315
  Ga0114918_10012039 JGI

SEQ ID NO: 1673 - DNA, 477 bp, Unknown
  Ga0137391_10019969 JGI
gtgtggtattggctgcgcgcaggtctggcagaagtcgtcagacgcgagccattcacgatccgtttgaaatgtgcaaccgccgagtacacccaaccggtcagcgtcggggtagatactggttcacagacagctggagtagccgctaacgccaatgaagaggtggtctaccagatgcattgtgtcgctcgcggcaactaccagttgtataacgggaagcgcagcgagcataaagtctgggcacccaagaagctgcacggttggaagctgtacgaactggttgaggcgaaaggagtggttggctatattggtggcaggcgagtgaaaggcagctttgtgatgaaggatgtgaccaccggaaaaacactggtcgaggtgaccccgcgcaaacttattcggctggtccggccttgccgagggtggatcatcacgaaacaagaaatgcagagagaggaggagcgcgcttcctctcccgtttaa

SEQ ID NO: 1674 - DNA, 296 bp, Unknown
  Ga0137391_10019969 JGI
gtcaatgaccaccccattgagggggtggctggtgagaaattcgtttcttgcacgccgaattgaccagactgtgctctcgagatcgaggagccgagcaagtaggcgtctgctcgatcaaggaaggagctccgatagcgggaagtggtcaagcacccaccttcgggtcctgccccagcctgaagccctggaactgttttcttaaccagtggtgcggtcagccaccgtggaaagcagacatcccgcccgctatccttgtcgaggggactacttgaccccgaaagggagacttatgggga

SEQ ID NO: 1675 - DNA, 1293 bp, Unknown
  JGI11643J12802_10127370 JGI
gtgagagtgcctgttttagacacaaccaaaaaaccgctagcgccgacaacgccgcgtcgcgctcgattgcttttgaaatcgggcaaggcggcggtgtttcgtcgttacccattcacgatcattcttaagcgagagatcgaaaatccgacgacgcccgatctaaagatcaaaatcgatcccggatcgaaaacgacaggcgtcgcaatcatcaatcagcaaaccggcgaagttgcctttgccgccgagatagagcatcgcgggcaggcgatcaaagcctctctggactctcgtcgctcgcttcgtcgggggcggcgtcagcgaaaaacccgttaccgcaagcctcgtttcgagaaccgaactcgcccgaaaggatggctcccgccttcgctcgaaagccggattgagaacgtctacacctgggcgcgcagactacaacgtgtatatccgctgaaaagcgtcgcgtatgagcttgttcgattcgatatgcaactattgcagaaccctacaatcgaagacgtcgaatatcagcaaggcgtccttcaaggctttgaactgcgtgaatatgtgttgatcaaattcaaccatagatgtgtttacgccgacgcgaaaagcccttgcgatgaggtcttgaacgtcgaccacctgatccctcgttcacgcggcggatcgaatcgagcgagcaatctcgtttgcgcttgtcgaaaacacaacgaagagaaaggcgccctgtcacttgaagaatattcaaagttgcgtggcgtcgatttctcaccgattaaagctcaggcgaaggcgcccttgaaagacgccgccgctgtcaatgcgacaaggtgggcgctcttcaatcgcttgaagactctcgatctgccgattgaaacgggatcgggtgggttgaccaaattcaatcgaacaaagctggaggcgccgaaggcgcattgggtcgacgccgcatgcgttggaaagagcacgcctgagaacttgaagatctcgaacgttcagccgcttcggatcagagccatggggcatggctcgcgtcagatatgccgaaccgataagtacggctttccaaaaacacatcgcacacgcaaggcaatattcatgggatttcaaaccggggacatcgtgaaggctgacattccgaaggggaagtttgcgggccgccatgtcggcagattgtcggctgtacgccaacgaccatcattcacattgaacggcttcgatgtccacccaaagcatttaaagcgaatccatcacagcgatgggtttaactataaaatgaaaactgtgggctga

SEQ ID NO: 1676 - DNA, 283 bp, Unknown
  JGI11643J12802_10127370 JGI
atctgctatgccacagttttcgagaaaagacaaaggcattgattcagcccgactaagtgattgactcgccagagttatgaactacgatctttgcgaatataacaatagtcaccttgggatgcgatgccagtcccaggctctgaggctcgcgtttaaacagttgatccgaacgcgaagacagtgacgtgagcaaacaaaccgcaaaagatcattgtccaggcgaacattacgtgagcgatcacgtcaaactcgaaagagtttaattaaccgtgagagtgcctgt

SEQ ID NO: 1677 - DNA, 1413 bp, Unknown
  human gut metagenome genome assembly, contig: NODE_539_length_54612_cov_5.601316, whole genome shotgun sequence WGS
atgagtgtattcgtggtcgggctgaacggatgccggctgatgcctacatctgaaagagaggcccgtttattactgaaacatgggaaagcttctgtttatcggaaagtcccatttaccataaaactaaattataagacaggcagtaccacacagcctggttatttggggatcgataccggatcgcagcatatcggagtgtccgttgtccgcgaagatggtaccgtgttacataaggaagagatcggtctcagggattccatgagtaaaagaaaactgatggagtcaaggtcttcattaagaagaggaagacgtcatcgaaagaccagatatcgccatccaaaatggagactaaaagccaaacgtgtttattacgaaactccagaccgaaaaggaagacactggaagaagcaaaagatcacgttcgcgtccaaacgaccgcagggctggcttcctccatcgctgcagtcaaagacggatcatcatatccagtggatcaagaagttacaggatcttcttccagatggatatcgtctttcgatcgaacttggtcgtttcgatccggcaagaatgaaagatacagagatccatggagatctataccagaaaggaccacagtatgactatgaaaatgttcgtgcttatgtcctcgatcgtgacagatatacttgtcaggtatgtggaaagaagggtggaaaattacatatacaccatatcctgtacagaagtcatggtgcgaccgataatccacagtatatggctacgatatgcagcgattgtcatagcacagagaaccatcaaccgggaggcatcctttatcagtggatgcaggagcagaagaaatttaccagaggactaagagatgctacattcatgaacatcttaaggaaacgtctgatgaaagcatttccaaaagcaacttttacctatggaaatatcacaaaagcagacagagagaaactgaagattcctaaaagccatggaaatgatgccactgcgatcgcaatcgtaaaaactgggatcatgacggtaaaggataacgaacctgtgatctatatccaacaggtccgaagaaaaaaacgttctctgcatgaagaaactccgagaaaaggacgcaaagaaccgaaccgtaaagcttcacgatacaataagaatacgaaagcagtcaccgtgaccaaaagaaagaataagaaaaggatatcgatcactggctgtctgttcgatcgtgtagaactgaatggaaagaaaggatggatctctggatttactgataagtcctgctatataaaggatgagaatgaccaatatattcggatatctccgaagtacaaacaggtcagtctgtcaaaactcaagatcctgcatcactgtggaaactgggtgataggagcaagaagatcccttggtaagggatga

SEQ ID NO: 1678 - DNA, 316 bp, Unknown
  human gut metagenome genome assembly, contig: NODE_539_length_54612_cov_5.601316, whole genome shotgun sequence WGS
ttgaataaccgagcatgcgaaaaaagtatgtgaagtcatttcatggtccccgaaagggcatgctgactagactcagtgcaacggaacccactttttgtgaggaataccattagtactacgtcccagatatcaatacccgacccggtagtacccaagccgggaacagggttcaggcaacggatgtctttcaggagaagaggacactgacctggagcacgaagtatctggaactttgtcgaagggtgatcactcccatccgggagggcaggacttttgtgtacctgccataacaatatataaggaggaccagccatga

SEQ ID NO: 1679 - DNA, 1248 bp, Unknown
  marine metagenome genome assembly, contig: NODE_629_length_21822_cov_14.725040, whole genome shotgun sequence WGS
atgccttgcgttcccgcaagagctaggcagttgcttaaaaaaggtaaggcatcggtataccgtcgctttccttttacgatcatcttaaacgaacgggtaggtggaagaactcaacctaccgaactaaagtatgacccaggtagcaaaaccactggcatcagtcttgtggtgcatggtaaaaccgctagtcgtgtagtatgggcaggagaactaacacatcgtagttggagtattgttgaggcactaaatactcgcagaaacattaggagatttaggcgttaccgtaaaacccgttatcgccaaccacgcttcttaaaccgcactagaaaggatggatggctaccgccatccattcagtcgcgtgtggataatatcgtgaccataacgcggaaattacaagtatttgcgccattatcatcacttgcttgcgaagtggttaagttcgatacccaaaaactacgcaatcctgaaatcgatggtgcagagtaccagcgaggtacgttgtttggtttcgagctatgggagtatttattagttaaatggaatcattcatgtgcttactgtaatgctaaaaatacgccattagaaaaagagcatgttgtagctaaaagtaaaggcggttcaaacagtgtaactaacctagtcgtttcttgccgaccttgcaacgaaaggaaaggcaccaaatcgattgacgaatttttgaaaaagaaacctagcgttttaaagaaaataaaatcacagcttaaagcgccactaaaagatgcggcgtcaatgaatgcgaatcgctatgcgatagccagagaattagaaacattcaacttacctgttaattacggaacaggtggtcaaacaaaatataaccgcacaaatcaaggctatcgcaaagaacactggatagatgcgtcttgtgcaaccagcacaggtgagaatatccaaatactggataccatgacgccactcatcattaaagccgttggccgtggctcaagaaaaatgtgccaaacagatggttatggtttccctagctctaagccaaaagctgtaaagaggattaatggattccagactaatgatatcgttaaagctattgttacgaaaggtaaaaagaaaggtgtttatgttggtaaagtatcgattagaagcactggatactttaatattaaaacaaaacaaggtaagatacagggcataaatcacagatactgcaacctattacaaaggatagatggctatgaataccacacctaa

SEQ ID NO: 1680 - DNA, 277 bp, Unknown
  marine metagenome genome assembly, contig: NODE_629_length_21822_cov_14.725040, whole genome shotgun sequence WGS
gttaactaccccgccctgaagggctgagcttgtaaaagctacgcttttcgggattagttgaccagcctaagttcttagagaactatgttagataggtcacgataccctagaatgcttccacagttctaggctctatcgtaagcagttaaacaggacggtgcgggaacaacggacagtgctgttgatgtaaaaagcctttctaaccttggcgagtggaccgttaccgcagaaatgcgtgagtcgcgtaagcgacataaatattaacaaattgaggtat

SEQ ID NO: 1681 - DNA, 780 bp, Unknown
  Ga0063293_10084471 JGI
ttgagagtccctgtgttaaatatgagtggaaagcctctgatgcctacaagtccgagaaaggcaagaatacttttgaagcaaggaaaggcaacagtagttcagagaatgccctttaccatacagttaaaatacccatcaggcgaaacaaagcaagatattacattggacataaataatagatattcaacaattggcttcagtgcagtaacagaaaaaagcgaattaatttcaggtgagttaaccctgagaaaaggcatctcaaaacccttggagcagaaaagaaattacagacgagttcgaaggaataaattattgcatagaaagccaagactcaataatcgtagcaaacccaaaagctggcttgcgtcaggtattcaccataaactcaatacacatctgagattgattgaaaaattgaaagaagtactacccataacgaaagtgatagtagaagtatcagcatttgatactcaaaagctacagaatccagagattaaagatgtagaataccagcaggaagagttgcagggacatgaagtaatagaatacctgctggagaagtggaagcataagtgtgcttactgtggaaaggataatcttcctctggagattgaacacatcataccaaaatcacgaggaggttctgatagagtttctaatctgactttagcgtgtcataaatgtaatcagaataaaggagataagacggcagcagagtttggacatccagaaatacagaaggtgggaccatacagaaaaaaaacaggagttatcttgtaa

SEQ ID NO: 1682 - DNA, 221 bp, Unknown
  Ga0063293_10084471 JGI
gtcaattacccccgttaaaaggggggttgttccgtgagggataagagcaatttgttgattaggagatattaaaaaatatgtggaagttattggtagagttaaagaacacatcaagggctcctcctcaagtctcctgctctataatatctctcgtacagtactggccaataataactctgctcaagacataccttctggcaggagtggaaagaacttgagag

SEQ ID NO: 1683 - DNA, 1311 bp, Unknown
  Ga0074255_1053809 JGI
atgaataatggccgcccgatagcggcctacgtgcaggccatcgacggttcaccgctgatgcccacccgcaagaaaggcaaggtgcgccacctgctgaaagacggcctggccacggtcgtgtgcagggtgccgttcacgatcaggctgacctacgagaccacgaggtacgtccagaaggtgtcgctcgggatcgacacgggctacgggagcgtcggcctgtcggccaccaccggcgacggcgacggcagcggcggaggcggaggcgaggtcctctacgaggaggagctgaccctcagggacgacgtcaagggcaacatctccaccagggccgagctccgcagggggcgcaggtccaggaatacccgctaccgcgaggcgaggttcgacaacaggcgcacgcccgagggatggatccccccgtccatgtcggagaaggttgacagccacgtctccatggttgagagggctgccgccatactcccggtgtccagcataacggtggaggtggggcagttcgacatgcagctcataagggcgcaggaggagggccttcccgcccccgaggggaggggctaccagtcaggccccatggcggggtactggaacgttcgcgagtacgtgctgtacagggacggccacaggtgccggaactgcggcggcaggtcaggcgacaggatactccaggtgcaccacctggagtcccgcaagaccggagggaactccccgggcaacctcgtcaccctgtgcaggacctgccacgacgggtaccaccgcggcgaggtggagctgaagataaggcgcgcaaggcccatggccgccgggaccggcacgaacatcataggccagcgcgtatacgacatcctgagggagaggtacggggatgagaaggtccgcctcacccgcgggtacgtcaccaagatgcgccgcagcgagcacggcctggagaagacccactgcatcgacgcccgctgcatatcaggcaaccccggcgcggcccccgtagaggggacgatgtaccggtcgaggaaggtcgcgtgccacaccaggtcccttcacgtgatgaagaccggcaagaaaggggcgaggcgcagcaaggtcgcatcccacaagataggcaggagccgcttccagaggtacgacatggtgatgcacgaagggaaggagtgcttcatctccggaagcacgggcggaaggccggtgctcaaagacatcgactggaacagggtcaccgaaaagcagtccgtgaacgtaaaggaaatcaagttcgtaagaaggatgcgtaacgggataataatacagaaggttaaatag

SEQ ID NO: 1684 - DNA, 372 bp, Unknown
  Ga0074255_1053809 JGI
ctcaagtttctaaagtaacttgtctcgacagagtaaagcggagccgcaagcgcgaatttaggagcgggttagtccaagccccctgcggccttgggggctacgttgggatggaaataggtaccccgggatgtgaaggagtcccaagtcccgggcactacgggcagcggttaaaagccccgaaaggggcggtgcccctgccgccaaacccatccgcaacatcgacgatgggaccacaactcctcctccgggaggagagttacgaccgaaaggttgtgtcggacccggacatccaccgagtccaaggaaaacaaaaaaaagaaagagatgaaaggacagaaggagaacaacatgaataatggccgcccgatagcg

SEQ ID NO: 1685 - DNA, 1341 bp, Unknown
  Ga0209800_10005712 JGI
atggcggtctacgtgctggacaagaccggaaagccgctgatgccctgcagcgaaaagcgcgctcgcctgctgttggagcgcagtcgagcccgggtgcatcggctgctgccgttcgtgatccggctcaccgaccggcgccaagccgattgtaccctgcagccattggcgctcaagctcgatccgggcagccggttcaccagcatggcgctggtccgccggcagggccggcgggtttcggtgctgtcgctgctggagctgatccaccggggcgcggcgatccgccaggccctgctgcaacgggccgcgttccgccggcgccggcgcagtgccaacctgcgctaccgggcaccgcgcttcgacaaccgcacccggcctgcaggctggctgccgcccagcctgcgccaccggctggacacgagtctggcctgggtcgcacgcctgcggcgctgggcacccatcgccagccttgccgtcgagcgggtcaagttcgacctgcaggctctgcagaacccaggaattgtcgggatcgagtatcagcagggcacgttgcagggctacgaggtgcgcgagtacctgctggagaaatggggccgtcgctgtgcctactgcggaaccgagcaggtgccgctggaggtcgagcacatcgtgccgcgcagcgccggcggcagcgaccgggtgtcgaacctgacgctggcctgccggacctgcaaccagaacaagggcaatcggccactcgaggtgttcctggcacggcaacccctgcgcttggccagaatcatggcgcaggccaaggcgccgctacgcgatgcggcggcggtcaatgccacccgcaacgccctgttcgcctcgctcctggctaccggcctgtcggtggaggccggcagcggcgggcaaaccaagttcaaccgtcgccgcctgggcctgccgaagagccatgccctcgatgctgtctgcgtcggcgaggtcgaggcggtggcgggctggcagcggccgaccctggcgatcagggccaccggccgcggcgagtaccagcgtacgcgcctgaccgcgcatggctttccgaggggctacctgacccggcgcaaacgccatttcggcttccagaccggcgatcgggtccatgccgtcgtgcccaccggcaagaaggccggtgtccatcgtggccgcgtggcggtgcgccagaccggcagtttcaacatccagacagcgggcggtgtggtgcagggtatagggcatcgccattgccacctggtccagcgagccgatggctacggctattccctgcaatcgttcgatagtgcccaactcgagaaggaggcagcgagagcaggggcacgctga

SEQ ID NO: 1686 - DNA, 291 bp, Unknown
  Ga0209800_10005712 JGI
gtcaactaccccggcctaaaggccggagcttgtgaaagcaggctgggttgaccagggaaagcggtaatcaacccgctccgtttgcaacaggtcgcatcgacccaccccggaatgcttcctcagttccgggctctggaaggtcgggatcatgcgggcgaaaggtaaagcgccgaaggttccgatcgccgcacttcgcgggagccggttgccgacattcccgaggggagcgagccgtaaggctccgtcaccaggcccgtaagggcattgtttgaaaggaggatcgccatggcg

SEQ ID NO: 1687 - DNA, 1227 bp, Unknown
  Ga0068305_10111221 JGI
atgatttatgttttgaacaaatacgggaaaccccttatgccaaccacgaatgagggttacataaggaagctgttacacagaggcgatgccgctgtggtgcaacacgatttgtttacggttaagttgttgaacgatactactgaccatacggataaggttacactcggcatcgaccccggatattcacacatcggattttcggcagtttcgggtgataaagaacttatttcgggcacacttgaacaggaaggcgcaggtaagaaatgcaccaatcctatgagcaaacgacttgctgataagctgatgtatcgtcgtaacaggcggtcgagactgtggcatagaaaggcgagatggcaaaaccgtgtttcaacgaagcagaaaggttggttagcaccatctcttatgcgaaagaaagatacacacttatctctcgtaaacagattgaagaaggtattgccgattgaccacatagttattgagcgcaacaagtttgacattgccgcgattgaaaacccagatattcagggtgtacagtatcagcgtggtacgttgtacgattacgagaacaagaaggcgtacttgctgtcgaagcaagagggcatttgtccgatatgcggcgaaattctgaagtctgacgttcacctgcatcacgtcaagccacgcgcaaaaggtggttcggataatgttggcaatatggttgctctgcataacgactgccataagcggttgcatcgtgaaaagttaaagctgtcaacgagcggtttcaagaagaagcacaaagcagacacgtttatgaacatcgtcaggcacaggcttgttgacgaattacaggcggacgtaacgtttggcagttacacgaaggttgcgcggattgagaacggcatcgaaaagacgcactataacgacgccttcgtgattgcgggtggaacgacgcaagaacgatgccgccctgttgtgttcattcagaagcgaaagaacaacaggtctttgcagaggaacaacttgcacacaaaaggcggcaggtcaatccgtcgtcagcgttcaatttatcagacaggcgatttgatttggacagcgagcgggatgcacaggtgtggcggtatgacgggtggccgcattgttctcaaagatgaatacaaggagggatgtaaatccccaattagaataagtactaaattaataacaaagcatttgagttcaaaaagcatttggactctttgcggataa

SEQ ID NO: 1688 - DNA, 274 bp, Unknown
  Ga0068305_10111221 JGI
ctttccaaagaagaattggataaggttttgaatttgattatccgcaatgagtccaatgacttggtgcggcagtcaaattagagggcaactcggaggagttgcagcagtttaagattgagatacatacacaccaaagggtgcttcccaagccctctgctctgtggttataaggacgtaaactcgaaagagcgacaccgaaataacttaaaaacatcttaaacaacctcgatgggaatcaacccgcttcggcggtgggcttgaaaaacaggaacaa

SEQ ID NO: 1689 - DNA, 906 bp, Unknown
  human oral metagenome genome assembly, contig: NODE_7457_length_3750_cov_2.000000, whole genome shotgun sequence WGS
atgttcgtatatgttttggacaagaatgggcaaccacttatgccaacatcacgttttggcaaagttcgtaggttactaagagataaaaaagtaaaagtagtaaagcgttgtccatttacgattaggttgttgtacgagcctgaaactaaaatcgtacaagatgttgtgcttggtgtagatactggttctaaacacgtgggtgtagcatgtgtaggtaatgataaggtattgtatcaatcacaagttgaactaagggatgacattaaaagaaaaatggattctcgcagaatgtatcgaagaagtcgtagaaatagaaagactagatacagaaaagcaagatttttaaatcggggcaattctattaagaaaggtaggcattgtcctacgattgttagtaaatactacgggcatgagcgagagattgagttctgtaagaagattatacctgtcaaagatacagtccttgaaacaggtaaatttgacactcaattaatggaaaagccttggttacaacaatataagtgggcatatcaaagaggtgtgaactatgggtatgcgaatgcgagggaacatgctttagttagagataagtatacttgtcaatgttgtggcaaaaagaactgtagagtagaggcacatcacatagtttttagaagtaaaaatggcagtaatgatttagagaattatattacattatgtgaagattgccacaaagcagttcatttaggggagattgagttgaaactgaatggtaaacgtaaaagtgatttacgacatgcaactcaaatgtctaccatcagaagcatgttgttaaagaaataccatgatgctattgagacctatggttttgtgacaaaagcaaatagggaaaacttgaatatcgacaaagaacattacttagatgct

SEQ ID NO: 1690 - DNA, 337 bp, Unknown
  human oral metagenome genome assembly, contig: NODE_7457_length_3750_cov_2.000000, whole genome shotgun sequence WGS
gtaaacatgcactaggttaaatacctagtaccttctaggtacggttgtttacaagactccgtggttagaaatagccactacgatagttggatgatacacatacacacccttggttgaatgctcaagactgaggttctgtgattgctgattaagttgggctaagagtgctgaataagtcctgtgttagtaatttcaaaactctaattatctttgtcgatgagaagtccgacacttattttgttaatagaaataagttaggcattacagttcagtgggtactgtcttacaaagtaaaactcactaaaaatcaatacgaaaggagttaagacgtatgttc

SEQ ID NO: 1691 - DNA, 525 bp, Unknown
  Ga0070770_10195732 JGI
gtgaacagcgtatttgtactcgacaatcacaaacaaccactctccccgtgttcacctgcacgggcacgtatgctgttgcgtaaaggcaaggcagcggtgtatcggcgctatccgttcaccattatcctgaaacaccgtaccggtgggaacgtgcatcccgtagaactaaaactcgatccgggcagcaagaccacaggcgttgccctggtgcaacagaagggcactggcgcagcggttatcttcgcagccgaactccaacatcgaggcgcggccatcaagaaagcactcagcacccgtcgcgcccagcgtagatccagaagaagccgcaatacccgctaccgtgcgccgcgcttcaacaaccgcacctcccagcactatcccaaagctcactgggtagatgcagcctgtgtcggggattccggaaaaacagtaagactcgaccctaagcagcaacccctgacaatcaaagccacgggtcgtggcagtcgtcagatgcgtcgggtggataaatttggctttccgcgg

SEQ ID NO: 1692 - DNA, 310 bp, Unknown
  Ga0070770_10195732 JGI
gtcaacgacccaccaccaaacctacccggttctggtgggggcttgtgagagcaagtccgaagttgaccaggcacagccaccagcgaactttcgctgacggggctacgttagtggcgaatacataggcaccttgggatgtccacccagttccaagctctgcggttggcgattaaacaggcttagaggggttaagccagtgtcgcccgcataaaaaaccgccgcataacattgccgagggtaacattaccgccgcaaggcgagaaagccggtgtagaccggcactgattcaaaaggaagtgacgtgaacagc

SEQ ID NO: 1693 - DNA, 1320 bp, Thermogemmatispora aurantia
atggtttttgtgctggacaagagaaagaagccgctcatgccttgctcggagaagcgagcacgattgttactggaacgcggacgcgccgtcgtccaccggctccatccgttcacgattaggctcaaagaccggctacttgaggagagtgtgctgcagcccgtcgggctgaagctcgatccaggtagcaaggtcactggggtggcggttgtgcgccgggaagagagggcggatggtccttgggatcatgccttgcacctggcggtgatcgttcaccgtggagatgccattcgggaacggatgcagaaacgagcggcacaccgccgccggaggaggaacgccaatctgcgctaccgcgccccaaggttcaacaatcgccggagggcaaacggctggttcccgccttcgttgcgaagctgggttgggaacgtactctcgtgggcgagccggtaccggcgcttggcacccattgcttttatcgagatcgagaccgtccggtttgacacgcaggcgctccaaaacccggagatctccggcgtggagtaccagcgtggcgagcttttcggctatgaagtccgagaatatctgctggagaaatgggggcgccgctgtgtgtactgtggtgcggagaacgtgccactggagatcgagcacatcgttccgagatcgagaggcggaactgatcgggtaagcaatctcacattggcttgtcgagcctgcaaccaggccaagggggaccggacggcggaggagtttggtcacccggaagtgcaagccaaggcaaaggtgccgctcaaggagcccgcggccgtcaacacgacgcgctacgcgatccggaacggtctgtgcgccatgggcagagaggttcgctcatggacgggcgggcggacgaagtggaaccgggaacggtttggactcccgaagacgcatgcgttggacgcactgtgcgtgggcgatcttgccggtgtgtccagctggcatgctctggttcttgaaatcaaggcgctgggacgcgggcagcggtgccggacgaacgtggacgcccacggtttcccgcgcggatacaggatgcgttccaagacggtgcgcggatttcgcacgggggatctggtgcgtgcggaagtactgaagggcaagcgcaccggagtccatattggccctgtggccgtgcgcgcctctggatcgttccgggtgggaaaagcggatgggatttcgtggaggtgttgtcgcctgcttcagcgggcagatggatacgggtatatgaaaggagggcgcggcgcctcctccccaggcgtaaacgccggggcttccggcgccgcatga

SEQ ID NO: 1694 - DNA, 317 bp, Thermogemmatispora aurantia
gtcatagaccccacgcctaaaggcgggggcttgcggggatgacccgaccagcccgtctatgaccagcccaagcggttgagccgaaggacaaggcgaggaagccgctacgtcgccggcaggccaaagacccactccgggatgcttccccagtcccggaccctggaagctccggctgcagacaaccttcggggtgtgggcgaaacgggccggagcagatggccagccggcgacatgggcgaggggagcggtccgggagagtccacccgggcccgtcaccggccccgtaaaggggtcccgaaagggaggaaaggatcatg

SEQ ID NO: 1695 - DNA, 1209 bp, Unknown
  Ga0207421_10015550 JGI
atggaagagaaagtttatgttcaagacaaaaatggtaaacctttagaccccacaaatccagccagagccagaaaattattagacaaaggcagagctgaagtagtacaaagagaaccttttactatcaaaatcgtagatagaaaaaaagaaaattcttatactaaagatgtaactttaggtgtagatgcagggtataagaaagtagggttttcagcaattaatgaaaatgaagagttaattagtggagtgttaaaactacgcaatgatatatctaaaaagttagaacaaaaagctaattatcgcagaaatagaaggcatagaaatactaggtatcgcaaacctcgctttgataatcgcaaaaaagaagaaggttggttagcacctagtattagacataagttaaatagccatattaaattggttaatagattaaaagatatattaccaattacaaaagtaatagttgaagttgctaaatttgacactcaaaaaatgcaaaatcccgaaatagaaggggttgagtatcaacaaggcaaattgcaggggtatttagttcggaattatctattagaaaaatttaattatcaatgtgcatattgtggaaaagaaaatacttctttagaagttgagcatataattcctaaatctagaggaggttctaatagagtaagtaatttaactattagttgccataagtgtaatcaaaagaaaggtagtcaaacagctaaagaatttggttatcctaaagtgcaacaacaagctaaaaagagtttaaaatcaacagcttttatgaatatagttagatgggaaatagttaataaattggattgtgattatacttttgggcatattacaaaaatgaatagaattaatttagatttagagaaaacacattataatgatgcttttgtaattgcaggaggtactaatcaaaatcgagttaatccaatagaagttaacattaatcgcagaaacaatcgttcattacagactaatcgcaaaacttatggtagaagtgttagaactcaaaaatattcattatcgccaaatgatttagttaaatatgaaggtgaagtttgtaaagttaaaggaacgtttaactatggtacttgggttagaatgaaagatagtcaaggtaatacagttaattcaaatgttaaagatgtagaattagttaaatatagccaaggtttatcatttataagttaa

SEQ ID NO: 1696 - DNA, 339 bp, Unknown
  Ga0207421_10015550 JGI
tcaactactccacctgaatcaagctaaagattcagatggagcttgaaaaagctcataagtggagtaggagattagtctaagcgatgtcttctctaaggtgaaggcaaatgagctacgtcctgggctgagtgtttgacatacaccctggagtgcttctccagcttcaggctctggaaactatggtggacgacctcataccgttatcctgatggtatgcaacatcaccatagtctatgcctgctccagacgttgacgaggagaacccacctccatttggagagatgacctttacaggtcgtaaaattatagttttaaggaagtgttagtatggaagagaaa

SEQ ID NO: 1697 - DNA, 1389 bp, Unknown
  Ga0180732_1000469 JGI
atgcagaagttattaaagagaaatacatacacacctacagatacttctctcgtctgtagctctgtggccgtgtctttaaacagagaggaaactctcagtgagcatggcttaaaaacctttgataacaccctcgaagagaatcgacctcagcatagagaggggcaaacattatctgccaaggtctatgtaattagtgtaggtggtgagagtctaatgccgacaacaccaagaaaggcgaggattttgttaaatcgaggtaaggcgaaagtgattagaaaaaccccgtttacggttcaattaacgtttcaaactacacggtttattcagccaataacacttggaattgacagtggttacaaaaacattgggtttagtacaataacggataataaggagttaatgagtggagaagttaaacttgataacatgatgagcaagagattgggtgatagggcaatgtatagaaggcaaaagagaaacaaactttggtataggaaaccaaggtttaataacagggtgtcgagtaagaagaagggatggttacctccttcgattcaaagaaggtatgacacacatttaaatttagttaataaaattaaagggttgttgcctattactaaggttatcatagaggtgggcaattttgatatacagaaattgaataatccagaaattgagagcaatggatatcaagaaggctcattgtaccaatatcagaatgttagatcttttattatttcgagagaaaagggtaaatgtcaattatgtggaaaggataagggaagtgattcgtggcgtcttcatcatattataacacaattaaaaggtggtactgataaacccaataattttgctttactacaccttaaatgccataaaaaattgcacaaacaaggattagagaatcaattcaaaaagaataaacaatataaagcatcgacatttatgaatattatcaaaaataagtttcagcaagatttggattgtgatatcacttttgggtataaaacctatgtggacaggtgtgaacttggtttagaaaaatcacacggcaatgatgcttttgttatagcgggtggaaacggacaggagagaattgacccgtttaaagttatgcaaaaacgcaaaaacaataggtgtttacaaaagaatcgcaggggatttgctccagcgattcgtaaacaaagatatccaattcaaccgaaggacttagttcaaatagccggtgaatggtcagagacaacaggtactcactgtaaaggctcaagaataatggtaaataaaaagtcaattaatatcagattagtggaaagtgtgtttcacacaggaactttaatatggagacaggcaatttctcccaaactcgaaaggttgggttttcttgcttga

SEQ ID NO: 1698 - DNA, 269 bp, Unknown
  Ga0180732_1000469 JGI
gtcaactacccaaacctaaaggattgggcttgttccgtgaggttcaacgcaagagctgattagagggcaaagaaacaatggaaataaaaatgcagaagttattaaagagaaatacatacacacctacagatacttctctcgtctgtagctctgtggccgtgtctttaaacagagaggaaactctcagtgagcatggcttaaaaacctttgataacaccctcgaagagaatcgacctcagcatagagaggggcaaacattatctgccaag

SEQ ID NO: 1699 - DNA, 828 bp, Unknown
  Ga0394881_0000594 JGI
atgcaaaaagtatttgtgttggacaaaaacagacagccccttatgccttgccatcccgctagggcgcgagagttattgacattggggaaggcatcggtgttcaaacgatttccatttacgattattctcaagaatcgtgaaggtggcgaactgcaacctatcgctctcaagattgaccccggcagtaaagaaacaggcattgtaatggtgggggatttcaagcgtggcaaacgggtgatttgggcgggtgtgctagagcctcgtggacaacaagttaagaatgcgatagaaatccgtcgcactttaagacgtgggcgtagggcagtaaatgccactcgttgggcattgtacaattgtctgaaaaattcgggattgcctatcgaagtcggtacaggcggacggacgaagtttaaccgcactaggcagggctacccaaaagcccattggattgatgcaagttgtatcggtgagagtggcatctgtgtttatcttgagccgaatatgtcttacttgcacatcaaagcaacaggtcatggttcgcgtcaaatgtgtggcaccgacaagtttggctttccaatacgccatcgtttacgccaaaaacgccattttggatttcaaacaggtgatatggttaaagccgttgtcatcaaaggcaagtatgtaggtgttcatgttggacgggttgcgtgtcgggcaacaggtagttttgatatcacgaccaaagcaggtaaagtaactgttaattacaaaaattgtagcatcctgcatcgcgcagatggctatagctacgcttatcaaagaaaggagtggcattcctctgtcagctaa

SEQ ID NO: 1700 - DNA, 253 bp, Unknown
  Ga0394881_0000594 JGI
gtaagcaatccatcgccaaaagcgaagaccctttaataagcctcatgcttaccagattcagcccattcgggctacgttaagggtgaatacataggtacttcgggatacttcaccagtcccgaactctacggtacacgattaaacaggcaaaatggaatatgcccgtgtcgtgtacataaaccactcactaacattatcgaggtgaacattacatccgcaaggacaggaaaaaatgaggtaactcatgcaaaaa

SEQ ID NO: 1701 - DNA, 795 bp, Unknown
  Ga0209591_10074768 JGI
atgcttaaaccaaattacgttttcgttctagatacccgcaaaatcccactcacgccatgtctgccctctgtagcatctcgcttattggatgcagggaaggcagcggttttcagaatgtttccgttcaccatcattctcaaaaaggaggtaaatgttacacctgaacctattgaactaaaaatagacccaggctcaaaaacaacaggactagcaatcctgcttggtgccaaagtcatctttgcggctgaactaacccatcgggggagagcaatcagcgcgtctttggaatcaagggcagcatcaagaggtagccgtcgggcacgccatacccgctatcgccagccgcgattcctgaaccggacgcgccctaaaggctggttggctcctagcctccaacatcgggttctaactaccctgagctgggtggagaaattccgccgctatgcgcccattggctcaatcactcaggagttagtcaggtttgatttgcaacagattgagaaccctgaaattgtcggggtcgaatatcagcaaggtgaactcgctggctacgaagtcagagaatatttgctcaacaaatgggataggaaatgtgcttactgtgacgcccaaaacctacccttgcaggttgagcatattcatcctaaatcaaagggagggagcaaccggatctctaatctggctctggcttgcgagaagtgcaacctcaaaaaagggactcaagatattaaggatttcctcaaaaagaaacctgaactactgaaaagcattcttgctcaagccaaacggccatta

SEQ ID NO: 1702 - DNA, 302 bp, Unknown
  Ga0209591_10074768 JGI
gtcagatacccagccctaaaggactgagcttgtagactgcccgactctagcgagcgggtataaaccaagctaatctgaccagcctaagtcttcacggttcgacttggctcaccgtaaactggctacgttttttgagtcacgacaccttggaatcaagctagttccctgctctgtcatctgcaattaaacagtcttaaggtcactgagacagtgttgcaggtctaacaagctcttaaaacattggcgaagcaaacattatcccttacaggaaactaagcgtcataatgcttaaaccaaattac

SEQ ID NO: 1703 - DNA, 900 bp, Lactobacillus mucosae
atgatgcaaaaacaaaaacaagttaattatgtctacgtagttgacgccaacggcacacccgtcatgccgacttcacgcttaggcatggtgcgccgctggttaaagtcgggccaagcggtctggtacggaaatagtcgtacgactatccagttcgtccgctcgattgatacgcagacccaaccgctgacgctgggcgtcaacaccgggtttcacttaggtatggcagtcgttggcaatgatcgcgaatactatgcttcagaaagcattcgtaagtcggaaaaggatcggatcacggcccgccgcgagtatcgacggacacgacgcaaccgcctgcgttatcgtaagccacgatttaacaatcggcggcgaaaagcaggttggctcgcgccgtccgttcagcatcggctcgagtttacggttcgcgagattcagcgcttgtaccggttcttgccgatcagtcagctggtcgtcgaggttagtcccttcgacaaccaaaaacttgccaatcccaacatcaagccgtgggaatacacgcaaggaaaaatgcacggctatcaaacagttaaggattatctgctggcccgcgatcataaccgtgatgccctggatggtcaagtctacccggcctcgcagctgcgggtgcaccacctcgttcagcgcaaagacggtggcacgaatcagcccgacaacctggttttgttgagtgacgtgcatcacaatcaagccaatcacgttaacgggacgctggccaagctggcagccaaccgacaacgaacgatcgactatcggggagcttactttatgagcctgcttgccagccgtttgaatcgttattttcctgactacgtgcagacgcagggctatctaacggctaatctgcgtaccgttacgggattgtga

SEQ ID NO: 1704 - DNA, 321 bp, Lactobacillus mucosae
agcagtcaacagaacccactactaaagtagcgggcttgcggtgcaaaccgtaagcatggttgattagcctcagtcatctttggatggctacgttaccgctgaatagataggtactctggaatgccaccctagttccagactctacggtcagccattaaacagagccaaggttccggctcagtgtggctgatatacaaaaccagcggataaccttggcgaagggtactcacgtatcggtctttgaccagatgcgacttactgattcattaattgattctagaaaggagtggcatgatgcaaaaacaaaaacaagttaattat

SEQ ID NO: 1705 - DNA, 1479 bp, Unknown
  Ga0256829_1004322 JGI
atgaaccgagtaatcgtactcgatacgaataagcaacaactagcaccttgccatccagcaagagctagagagttacttaggaatcaacaagcgtcagtctatcgtaaacaaccgttcacgatcatacttaaacatactgtagatgtagtcgatacacctactagatacgaactcaaaatagaccccggtagtaaaactacaggagtcgcggtcgtacaacacaccaccaatggttctaaagtagttatgggtatcaacctacaacacagaggacacatcataacacaacaactactagctagaagacagttacgtagttctagacgtagtagaaacttaagacatagaccagctaggtataataaccggagaagatcgtcagactggttacctccttctatacaatctagactagataacgtacgtacagtagtcaatcggttactaagaaccatacctataacgtctataactatggaagatatcaagttcgatccagctaagatgactaacaataacatacatggaaaagagtaccagaacggtaccttagtaggaacagagatcaaagagtatctcttagccgctaataaaggtacgtgtcagtactgtcacggtaaaactaatgataatcggttagaggtagaacacgtacaccctaaatcaagaggtggtagtaactccgttactaacctaacgttagcgtgtaggacgtgtaacatagctaaaagtaacatgctgctcccagagtggaaagcacacttggggctctctggtaaaccgttagatataatacgtatatctgttatagataaactaagactcaacaagactgttaaactcaaagatgctacagttatgaatgtgctacgtaagcatcttaaacatctcttagagtcgtacgggctaccagtagaatatgccttcggttacgttactaaatacaatagaactaatcagaaacacagaaaagatcactggatagatgctgcgtgtgttggtactactggtactaacgtatacatccataagaaacacaaatgtctaactatgcgtgctatgcaaaataacaacagacagatgtgtcttagtgataaatatgggttccctagaactagacctaaaggtcctagtaatgtctgtggttatcgtactggagatctagtcaacgctgtggtacctagaggtaagtatataggtagctatacaggaagaatatccgttagaaccagcggttacttcggtattaataaaatagatgttaactataaatatatgaagttactacaagctaatgataactataaatactcttatggcacacctacactacacaatatcatacatagagagaaccaaaacctctctaaactagttcatgatataggcgccaaacactacactatccaaaagatggttaagcatggtcaacaaggtaacactgtacgttatcttacaacggttactatagcggcatag

SEQ ID NO: 1706 - DNA, 285 bp, Unknown
  Ga0256829_1004322 JGI
gtcaactaccactacctgaaggaagtggcttgtaatatagctacgacctaaccataggtaagacttgtaatatagtctaagttgtccagtctaagtacttagagtactacgttaggatagaatatataggtaccccgcggtggccgttccagcccagggctctacggtatatagttaaacaggtctgtgtggaaggaccagtgctatatacttacaacctatccataaccttgacgaggagcacataacagttatcctagtggtaactagaaacatagtaaggaa

SEQ ID NO: 1707 - DNA, 585 bp, Archaea archaeon
atgcgtggaaaaccattaatacctacacgacctggaaaggcaagaatacttttgcagcaaggaaaagcaatagtaattcagcgagcgccatttactattcagcataaacttgagacacatctgagattgattgaaaaactgaagaaaatactacctgtaacaaagataggagtagaagtagcgagttttgatatacaaaaaacccagaatccagagattaaaggaatagagtaccagcagggagagttacagggttacgaagtaaggaaatatatgctggagaagtggaagcataagtgtgcgtactgcggcaagattaatcttcctctggagattgaacatattatacctaaattacgaggtggaacagatagagtttccaatctggttatagcgtgtcataaatgtaatcagaagaaagggaatcaaacagcagcagagtttggacatcctgaaatacatcagaaagcaaagcaagcattaaaagaaactgcgtttatgaatattgttagatggagactggtgaatactctaaagtgggttggacctgtgggtatattacaaagcatgctagaattaaattag

SEQ ID NO: 1708 - DNA, 257 bp, Archaea archaeon
accaatcaccacttattaaaatggatggtctgcctcgtgagagataagggcaacaggctgattatggggcgttaaaagatgcagaagttattggtagagtttcagaacacaccagtagtagatactcctcaagtcccctgctctgtaagtgagacattaaacagagataaaaagtctcagtgtaccctgtatagtactggccaataacagctccgaagaggacttacactctggcaagagtggacaggcgttgagcg

SEQ ID NO: 1709 - DNA, 1308 bp, Unknown
  Ga0209204_1004127 JGI
atggtttatgttttatctattgaaggcaaacctttaatgccaactaaaaggtatggtaaggttagacatcttctaaaacaaagacttgctaaagtagttaaagttaaaccttttactattcagttactttatgaaactactaactatacacaagacattacacttggtatagatagtggctataattatataggtttttctgctgtaacagagaaagaagaactaatctctggtgaagttaagctaagaaatgatatacctgaacttatcaaagaaaagcaaatgtatcgtagaattagacgaagtaaactaagatatagaaaacctaaatttaataacagaacatcatctaaaaaagaaggatggttagcaccttctattaaacataagttagattctcacattagatttatagaataccttaaaaagatactccctataactaatatagttatagaggtagctaattttgatacacataaactaaaaaatcctaacgtagaaggtgaaggttatcagcagggagaacaacaaggcttttataatcttcgtgagtatattctttatagagatgactatacttgtcaattatgtggtaaaaccaatgttccacttgaagtacaccatataggcttttggaaaggagatagaacagatagaccaagcaacctaataacactatgtactaaatgccatactcctaaaaatcataaagaaagtggcaaactatatggtatgaaacctatacaaaaatcactgaaggaagcgacatttatgtcaactgtaaggtggaaattagttaatacattaatgtgtaactatacttatggttatattacaaagtctaaaagaataagccttaacttagaaaaaactcattataatgatgcgttttgcatagcaggtggaactgttcaaacaagagtagaacctatatattttgaacaagtgagacgaaataatcgttcctttgaaaagttttacgatgctaaatatatagatataagagacaactctattaaaacagggcaagaactatttaacggtagacgaacacgcaacaaaaactacaatatagaaaacttaagactgtttagggggcaaagagtatctaaaggtagaagaagtattcgtacacaaaggtatttttatcaacctaaagatatagttatatttgaaggtaacaagtatattgctaagggaatacaaaacaagggtagttatattaaacttgaaaaactgcctaaacctgttaaaacagaattagttaaaccttatatgtttagaaaaggattatgtattctgtag

SEQ ID NO: 1710 - DNA, 270 bp, Unknown
  Ga0209204_1004127 JGI
gtcaactacccaccgcctatagaggcgggggcttgtagaaatacaagctcggttgattagcctcagccaccagcgatatgctgacggggctacgttatatgggaacatatagtcaccataggatgctccacaagtcctatgctctgagggtagtggttaaacatctctgaggggtaggagaagtgctgctactatacaaaaccccatataacattggcgatgtggacctacaggcttttgcctgaattacctttaaggaggtttaatatg

SEQ ID NO: 1711 - DNA, 1023 bp, Unknown
  Ga0102924_1014628 JGI
atgaatgtagtgtatgtactttcaccagacaaggtgccactcatgccttgctcgtgcgcgattgctcgcttgttgctcaaacaaggaaaagcaaaagtggcccgccgaaccccttttaccatcaaactgcatactcagccagagagcacctacacccaacccctgacgcttggaatggacacaggcagtgcggtgatgggttcggcagtggctgatgaacagggcaacatattgtatctctctgaagtagaagtgcgcaacgatatcgccaccacgctcaaagaacgggcttcctatcgccgcaatcgtcgtcaacggaaaacccgctaccgccaagcccgatggctcaatcgcaagaattccatcaagacagggcacttttcccccacgatgacgagcaaaatcgacgcgcacctgcgagaaattcgctttgtccagtcgttgttaccgattcactccctaatgctggaaacagggacatttgaccctcatgccttgaaacatcccgaggtcttgcagaacaaatggatgtaccagaagggcatcaactacggttttgccaataccaaagcctatgtgctcacacgagatggctacacctgccagcactgcaagggaaaagcaacagatcggcggttagaggtccatcacatcattttccgcagcgaacggggaagcgatgaggaagcgaatttgctcaccctctgcaagacctgccacgatgccctccatgcagggagcatcacgctcaaacaaaaaggcgcgagaaaaggaaatctgcttcatacgacgcagatgaacagtatccgcatccagttgctccggcgcgttgcggcagaggaaacctggggctttgtgaccaaagaacaccgcctcttggcaaaacttcccaaagcccatgtgtttgatgcagcggtcatcgccacacggggaacgatcccaacctttcacacgacaatcatgcttgcgaagagattcaaaaacccctgccgtgtttctgattctctcctgttggaatggtga

SEQ ID NO: 1712 - DNA, 298 bp, Unknown
  Ga0102924_1014628 JGI
gggagccacggagtcttcagccctgtagcttcttcggaagcctgagttcaccagactcctttccagaaatgggaagaccgttcgagtggttatgatacctgcggttgacgcatcagactgccgctctatcgcctgtagttaagtagaactgagggaaggttcggtgctacaggtgcaaaaagctgcttgaacactgtcgagatgaagtcggattctcttcctggtcacaggggagggatacgcaccacccggcgcttgccggagcatttttccgaaaggaatcgccgtcatgaatgta

SEQ ID NO: 1713 - DNA, 1509 bp, Unknown
  Draft_10001674 JGI
gtgcaagataaagtctacgtagtttcaatgaacaaaaagccactaatgccaactacaaactttgggtacgttagaattttattgaaacggaaaatggctaaagtcatactatcaaagccgtttaccgtgcagttactttttgaaaccgaagaaaatgttgtaccgactgtgttaggacttgatcccggtcgggtgaatctagctattactgtattagaaaaagaatctggtaatgttttaatttcttcggagttggtaacccgtaataaaagtgtttccaatctaatgaaggaacgaaaggcgcaccgaatgattcataggggctgccgaagagccaaaaaaatacgtagagctaaacattctaagacggtctttaaaaatgccaaaaacatcatacaatccggcgctttgaaacccatcaaggtaacgtatattaagccaaaaccagctaggtttttaaataggactagaaaagaaaattggcttactccaacggccaatcatcttttggaaacgcaccttcattatgtaaatcttatatgcagaatcatacccgtaagtgaaatagtcattgagtacagcaagtttgatacacagaaattgaacaatcctgcaattcaaggaaacgagtatcaagaaggactgcttaaagggtatgatagtgtccatgattatatttatcaagcacaagacaagcattgtttgatgtgcaaaaacaagattaaacatgatcatcatattgttcctcagcatgaaggcggtagtgaccatccggataacatagcgggtctttgtaagaaatgtcatactaaagctcatacagataagacgtttgttgctgaaattaaagtcaagaaggaaggatcaaaaaaatcctatgatagtgtcggaattcttaattccatcatgccaagagtactgcaaacaattcaagaattgtatgggacagaaaatgtcaccataacgacgggtgatcgaacaagtcaggcaaggaaagcgtatggcctcaagaaaatgcactgtaacgatagctacgttattgccctgtcaaatgttgatcatgtaagtcgtatacgcgatattttgccttatcagttcatgcaataccggaggcataatcggaaagtatgtgatgctgtaagagaacgtcattataaaaataatgacaagaagttagtcgcatccaacagaacgaaacgatacgagcaaaaggacaattctttatttgagtataaaaagcaactcaaagaagcgggactgactaaaaagaaaatcaagcaatctatatcaaatttaaacgttgagccatctaagaaacggcttaaaacgccaaccaaaaaacttgctattaatgcaggatgcaccgttctttataggtctaaacgatatgtggttaatggtactttaaataaaggcataacattgaaattccacggttttgataaagaaacgttctctattgaaaaatgcaaattaattacaaggaattcagggttagtatgtagttaa

SEQ ID NO: 1714 - DNA, 274 bp, Unknown
  Draft_10001674 JGI
gtcaataacccctcattaaaatgagaggcatgttagattagcactttccgcaaggaaagaactttacctaatatgttatcaagtgtgcttggtagttattgaacagggaagagagatttacaagacaccttaaaataccactcccagttttaagccctgtgatacttgtatatctgtcccaagggagactcaccgacttaacttgtttgccaacaaacaggaagggtcgtgtttaccaaaattacgaaaggaattcatataagtgcaagataaa

SEQ ID NO: 1715 - DNA, 1050 bp, Unknown
  Ga0306921_10158369 JGI
atgccacgcggccagagctcgagaattggtgaggaaaggcaaagcagtcgttgtgcgtcgctacccgtttgttattcgcctaaaaaaggatcattcggggcggcagccaatagccatcaaaatcgatcccggagcaaacacaactgggatcgcgctcgtccgattagcttcatctactcaggtcgttttgcatctttccgagttgacgcacgggggggatgcataagggagatgctcaataaacggcgtgcatccaggaaaagtcggcgtgcgcgcaaaacccgttatcgtgcgtcgaggtttaataaccgcatcaggcacgaaggctggttgacaccaagtctgcattcgcgtgtagacaatgtgatttcatgggtcaggcgctaccagctgtgggtaccgattagcgggatcgtcatagaggccgttcgtttcgacattcaaaaactccttaatccggggatatctaacgcggaatatagacaaggcacattgttttcgtacgagctaagagagtatctcctcgaaaaattccagcggacttgcgtctactgtggaagcgagaacgtccggcttgaaattgatcatgtgcagccgcggtccaaaggcggaaccatgaaccctaacaacctcgtactggcttgccacggttgtaaccgggctaaatggagccagccgattgaagacttccttgcaaataatcctgaacgcctaaagcggatcaagagccagcttcagacctcgcttagagcgactgcggcgataaacgccactcgcacaaaaattctgctggaacttttcaggatgcatctgccggttgaggtatcgacgggaggtgaaactaagtttaatcgaactcggcttagcattccgaaaagccacgcattagatgctgcatgcacgggcaaaacacaggaattgctcggatggaatatgtctgtgctctcgattaaggcctgtggcaggggctcgtatcagagaactctcctagacaagtatggttttccgagaggttttttgatccggaagaaaaaaaccaaaggctttcag

SEQ ID NO: 1716 - DNA, 296 bp, Unknown
  Ga0306921_10158369 JGI
gtcagctacccacgactaacatcgtgggcttgtagaaatacgagccgtggttgaccagaccaagaaagcaaaaaatgcgatctacgttaaaatacaagtcaaagacccactccggagtgcttcctcagctccggaccctggaagtcccggttgacgttacgggaaaggtaaagcccggcacgaccgagacgggtccgccagatgcggatcagactggttttcaacatggtcgaggggagcgtccaaaaggactgtcaccttctcagcaacgagaagagaaaagcggggtaacccgc

SEQ ID NO: 1717 - DNA, 777 bp, Unknown
  Ga0103869_10001850 JGI
atgcaaagagcgttcgtgctagacaagaaaaaacaaccgttgatgccctgccatccagcaagggcgcgagaactattacgtaaggggaaagcgcgggtcttcaagcaatacccttttacgattattctcacagaacgggaagcagggacggtacagaatgtcgctttcaagatagatccgggtagtaagaaaacagggattgtgttagcggcagatttcaaacgtggtaagcgtggtatttgggcagcggtactcgaacatcgtggacagcaaattaaagccgcacttgaaacccgtcgtaacctacgacgtagccgccgcgctcgacatacccgttatcgtccagcacggtttttgaaccgacatacgggcaaagggcatttaccgccgtcgctgcaatcgcgtattgagaatgtctggacgtggctatgtcgtatccatcgtgtatgtccgattagtagcatctcacaggaactcgtgcgcttcgatacccaactcatgcaaaacactgagatttcgggtgttgagtatcagcaaggaacgctgctcggtatggaagtccgcgaatacttattcgagaaatggggacgcaaatgtgcctactgtggtaaacaagatgtgccactggagatcgaacacatcacacccaagtctcgtggcggctcgaaccgtgtcagtaacctaacaatagcctgtcacaattgcaatcaagaaaaaggctcccaaaccgcagtcgaatttggtcatgctgaaattcaaagcaaatccaaacaaccg

SEQ ID NO: 1718 - DNA, 248 bp, Unknown
  Ga0103869_10001850 JGI
gtaagcaaccccgcacctacaggtgggggcttttgaagcccaatgcttaccagactaagcgaaagctacgttaggggcgaatacataggcacttcggaatgcttcaccagttccgaattctgcggtggatggttaaacgggacgattgggagtaagccagtgccattcacaccaaaccgctccataacattgtctaggtgaacttatctcccgcaagggaagatttttgaggtaactcaatgcaaaga

SEQ ID NO: 1719 - DNA, 1629 bp, Unknown
  Ga0114939_10008276 JGI
atgaaaagtaaacgagacaggagacaaacactcagaagtacttccctagcctctggcaagtctattgaagatttctgggctgatgctatacctcttgagggtatgggtccgaaagcaatttcgaacgacacagcttctgctttttatctcaatggcgaagggacgtctgaaaagaaagagaatgagaaagaggaggagaaatcgaaagatctatctcaatctggacctgaatctggaaataaggacaaacacaatgagattatatcaaaatcaaattattcttcgagacagaatccgaagaatacagtgtctgtatttggaccagataagaaaagattaaaaaatacaaggatatctaaagcgaagaaatggataaaacaaaagaaggcaagacaggtcaaggataaatctagacttggagaatttgcgatacagttattgaacaaacctgttggtaagataagagttccggtagtcgataaagatggaaagccattaatgccaacgttgtcgggcagggcaaggagatggattgagaaagggaaagctgtcggtaagagaactaagacaggaatattttatgttcagttattggtagaaccttctggaagaaataagcaagatattgtagcaacattagacccaggaagcagatatactggagtagcagtatgttctaagaaacaggttctatatggatgtaatctagaacttatagctgatgaaaaagaaaatagatttgcatctatcaaaaatagaatggataagagaagagaattgagacgaggaagaagatatagaaattgtagaagaagagaagccagatttgataatagatcgaaaacgggtaagatggctccatcaataagagcaagaaaacaattggaactgaaagtgatatcagaattatgtgagatatttcctatatcagttattgggatagaagatgtagctttcaatcactatacaaagagatggggtaagaacttcagtcaagtagaggtaggaaagaaatggttatatgaagaactgaagaaaatacctggaattagagaagttagactaataaaagggtatgatactaatatcagaagacaacaattaggactagagaaaggggctaagaaagaagaaagagaagtcagagcccatgtcaatgattgtatagcgatgggatctataatattggggattggaatagagacaaagactcggttaagacttggtataaattttgatatcattacaaggcctaaatattcaagaaggaaattgcatgatgagaaggcatcaaaaggcggaattaggaaaagacatggtggtacgacaatagattggacaaatatcagattaggagattatgtggaggctgctagaactgaaaaaggtattggaaagatgatttatagaggttgggctggcggattcagtagtggtaagaatgataataattcgatatctttatatgattttgattggaaaagaataggtcaatttggagttaataacgtaagattattgaatagaaggacaggactaatggtcaagagtatggagatttcagaaaatatagataatatctgtaaatatgggactgaacaggtgagaattgaagatgcttggaagtag

SEQ ID NO: 1720 - DNA, 241 bp, Unknown
  Ga0114939_10008276 JGI
gtcaactaccccgccctgaagggcgggcttgttgtgagactcaggactcgccaagataaccaaaaaggtgaataagttagactagcctacttagaggtgaaataagtcaatgaaaagtaaacgagacaggagacaaacactcagaagtacttccctagcctctggcaagtctattgaagatttctgggctgatgctatacctcttgagggtatgggtccgaaagcaatttcgaacgacaca

SEQ ID NO: 1721 - DNA, 1005 bp, Unknown
  Ga0311341_10020266 JGI
atgcaagtaccagtaatagaccaaaaccgaaatgctctgatgccgacttctccggcaagagcagcacagtggattaagtccaagaaggctaccccattttggaatttgggtatattctgtgtgcggttgaatcaacccacgggaaatatcaaagaaaatatttcgtgcggggtggacagcggaagcaaacgggaagcggtttgtgttaagtcctcaaaacacacttatgtcaacattttagcggatgcggtgacatgggttaaggaagcggtggaacaaaaacggaatgctcgtagaacaagacgaaatagaacgactccatgtcggaagaacaaatacaatagaactcgtggaggattgcctccttccaccaaggcaagatggaattcaaaactccgcattatcaataaactaaggaaaatctatcctattaactcatatgtggttgaagatattgctgcttccaccaaaaagggaaagaaatggaatgtgacgtttagtccgcttcaatgtggaaaagaatatttctacatggaattggagaaacttggaaaactcacgactaagcaaggatatgagaccaaagagatgcgggataaattgggattgaaaaaatcatccagtaaaatggctgagatttttgaggcacataacgtagatgcttgggtgttggctcattcagatgtaggtggagatttagacaacaaggaactaacgagagtagttccattgagattccatagacggcaactccatatgttccaaccatctgtgggtggattgcgaagaccttatggtggaacgatgtcactgggatttaagcgtgggtctttggttcggcatccaaaatatgatttgtgttatgtaggtggaactttgggagaccgaatttctctgcataatctaaaagatggaaagcgattatgccagaacgccaaaccatcagatattaagtttctggcatacaactattttcgttgctcctcccctactctaaagggatag

SEQ ID NO: 1722 - DNA, 168 bp, Unknown
  Ga0311341_10020266 JGI
gtcaataacccacgaccctaaagggtcggggcttgaaagaatataattaaccaatatgtttagacaagttaaaacgttgactacacaatcaacaactgaacgaaatggatgtggtaatccaaaatatattgaggatgcttcccaagtcctcttttcctatgttcgtca

SEQ ID NO: 1723 - DNA, 933 bp, Unknown
  Ga0265294_10058290 JGI
atgagggttccggttctggattctcgcaggacgccgttgatgccgaccacacccgtacgggcccgcctgctcatcaaactggggcgggcaaaaccgtactggaacaagctcggcatcttctgcatcatcctgacctatggcgtacagcctgacaaccaggatctggtcgtcgggatcgaccccggcagctcctttgagggctggtccgtggtcggcacccaagagactgtcttgaacggcatgtcggagacccccaagcacgtcaagaaagcagtggagactagaagagtgctgcgtcgggcccggcgaggccggaagtgctggcgtcgcccggcccggttcaacaaccggctccgtggtcggcagttcctgccgccgagcacgttcgcccggtggaacgccaaggtacggatcctcaaccaactccagaagatcctgccgatcaccgccgtggtcgtggaggacgttgcagcagcgacgaagaagcactgcaaacggtggaacacgaacttctcgccgttagaggggggaaaacagtggttttaccagacgatccgggatcacggccttgatctgcacccgcgtgccgggtacgaaaccaaagcactccgggaccggttcggcttgaagaagacaagccagaagagcaagccggtcttcgccgctcatgcagtcgatgcttgggtgatggcggcggacgtctcgggtgcggagcagccgaccgaacgggggttgttctactggacgccgatccggttgcaccggcggcagttgcaccggttgcagccggataccggcgggatccgaaaaccctacggaggaacccggtcgctcgggttcacccgggggacgcaggtccggcacgtcaagtacggattagcctatatcggaggaacgttgaaaggaaagatgtcattgcataacgcggtcacc

SEQ ID NO: 1724 - DNA, 366 bp, Unknown
  Ga0265294_10058290 JGI
gtcaactacccctggttaaaaccgggggcctgtgaacggctacgcaggaccaaacagtagactaggaggcaagaaattgcagcagcgttacgggctacaagaacggcgggatgtttccctagtcctgccctcttccgggcacgccgaacccgacgtacctctcggggtactaagcctgcctcgcaactccgaagggaaatgcaaccccggctcgaccgggagaaggtaataccatgagggttccggttctggattctcgcaggacgccgttgatgccgaccacacccgtacgggcccgcctgctcatcaaactggggcgggcaaaaccgtactggaacaagctcggcatcttctgcatcatcctga

SEQ ID NO: 1725 - DNA, 981 bp, Unknown
  human gut metagenome genome assembly, contig: NODE_1363_length_7809_cov_11.459247, whole genome shotgun sequence WGS
ttggtttggaatgtacaggcaccgtgggatgtttatcctagtcccacgctctgcggtctgtgtttaaaagttctgagaggtaggaacggtgatgcagacaagaaacccattccaacattgacgaaggatgagaatcggccctcgggccgaacaaccggccttcgggccgagcaagcggagcctgcgggtatccgcaaaggagatactttgaaagtatttgttttgaacatgcgcagcaagccgctgatgccgtgttcgccagcaaaggcgcgacacatgctgaaggcgggcaaggccgtcgtcgtgcgtcgaacgccgttcacgatcaagctgaccatcgccacaggcgagacgaagcaggacgtgacgcttggcgtcgatgcaggcgcaaggcacgttggcatttccgccacgacggaaaaggaggaggtcttcgcgtccgaagtcgcgcttcgacaggacatcacgggacttctggccgatcgtctggcattccgacgtgcaaggcgcaatcgaaagacgcgctaccgcgctccgcgcttcaacaatcgcgttcgatcaaagcacaagggatggcttgcgccgtccgtggagaaccgtatccaagcgcacatttcgcgcatcgaggcggtctgcagactgcttcccgtcaccaagatcgtgattgaaaccgcatccttcgacattcaaaagatcaggaatcccgaagtcgaagggacgggctatcagcagggcgaccagcttggattctggaacgtgcgcgagtacgttcttttcagagacggtcatatctgtcagcactgtcgaggccgatccaaggatccgatcctcaacgtgcatcatcttgagagtcgtaaaacgggcggagatgcgccaaacaacctgatcacgctgtgcgagacatgccacaaggcttatcacgcaggaaagatcaagttgaaggtcaagcgcggtcaatcgttcagggcggaagccttcatg

SEQ ID NO: 1726 - DNA, 285 bp, Unknown
  human gut metagenome genome assembly, contig: NODE_1363_length_7809_cov_11.459247, whole genome shotgun sequence WGS
gtcaataacccccgcctaaaggcggaggcttcaaagagcctttattgactagtctcagcaaacctcctctgggaggcgagctacgttggtttggaatgtacaggcaccgtgggatgtttatcctagtcccacgctctgcggtctgtgtttaaaagttctgagaggtaggaacggtgatgcagacaagaaacccattccaacattgacgaaggatgagaatcggccctcgggccgaacaaccggccttcgggccgagcaagcggagcctgcgggtatccgcaaagg

SEQ ID NO: 1727 - DNA, 1308 bp, Unknown
  sediment metagenome genome assembly, contig: NODE_138_length_117839_cov_9.207605, whole genome shotgun sequence WGS
atgccatgcaccgagaagcgggcgcgcctccttctcagaaaaggccgtgcggtggtccaccgcatctcccccttcaccatccgcctcaaggaccggctcgccgaagagagcaacctccagccctgccgcctcaagctggacccgggattccggcagaccggcgtcgcggtcgtgcgagaggagcaggaccctcacggtcccgtccaccacgccctccactgcgcagtgatccaccaccgccaggaggaggttcggtccgacatgctcgcccggcgctctgcccgtcgccgcaggcggagctccctgcggtaccggcctccccgattcgacaacaggcgcaggccccaaagatggctccccccgtccctgcgcagccgcgtctgcaacgtcgtttcgatcgcccggctgtacacgaggctttcccctatcgcggccatcgacgtggagctcgcgaagttcgacacccacaagctccagaacccggaggtctcgggggtgtcctaccagcaaggggagctgtggggctacgaagtccgggagtacctgctggagaaatggggccgcaggtgcgcctactgcggcgccacaaacgtcccccttgagatcgaccacatcgtccctgtgtccaggggtgggacggaccgggtcagcaacctcacgctggcctgctcggcctgcaatcaggccaaggggaaccgaacggctgaagaattcgggcaccccgaggtgcaggagaggacaaagcaacccctggtaggtgcggcggcgatgaacgccacccggtacgcgatgctcagtgccctccggtcctttgggctgtccgtgtactcccacacggcagcgcggacgaagtggaaccggagcaggctcgggctatctaagtcgcacactgtggacgccctctgtgtgggggagatggccgcagtcgccggatgggagatgccggtgcttgggatccgcgcgattggcaggggtcgccggtgccggacgaacttcgacgcgcacgggttgcccagaggatatctgccgcgcacgaagcgggtgttcgggttctgcacgggggatctggtcgttgccgaggtgccaagtgggatgtacgcaggccggcacatgggaacggtcctgatccgctccagcgggaggtttgacatcaaggacctgcgcgggcggcgggtggcgcaggggatcaggtggcagcactgccgcctcgtacagcggttctgcgggtactcttacggaaaggaggaagcggcgccttcctccccacgcctgaaggcgggggccttcggcgccgcagaaggatggtga

SEQ ID NO: 1728 - DNA, 318 bp, Unknown
  sediment metagenome genome assembly, contig: NODE_138_length_117839_cov_9.207605, whole genome shotgun sequence WGS
gtcatggaccccacggctaaagccgggggcttgcgatgagcaagcctgcccatgaccaggccgagcgcttgatccgacggacaaggggatgacggcgctacgttgccggcagtgctcgcagacccactccgggatgcttccccagtcccggaccctggaagccccggctgcagacaaccttcggggtgtggagaaacgggccggggcacgtgccggccggcaacatggccgaggggagcgcggagaggagtccatcccgcgcgtcaccaggcccgtaagggcgccccttcgggggcagaaaggaggtagggagccttg

SEQ ID NO: 1729 - DNA, 837 bp, Unknown
  Ga0376086_0041273 JGI
ttgtcactgtttcgtctaaaaggcggaatcatcctgatagaggtgtgcgaagggactttcaaacttgactcaaggattatctccatgcgagtaccagttttatcgccagaaggacagccactcatgccgactaaaccaagtcgtgcaaggcgatggctaaaaagcggaaaagccaaaattgtttataacgatttgggcatttttaccatccaactgatgtttgagtcatctggcactaacactcaaccaattagtgtcggtgtcgatccgggtaaaaaatatacgggaattggcgttcaatcagctaaatctactttgtggatggctcatttacaattaccttttgaaactgtcaaagggcggatggagcaacgacggatgatgcgtcgtggtcgcaggggaagacgagttaaccgcaaagttccctatagtcaaagagcgcatcgccaagcaagatttgacaatcgacgctccaaaaaagttccaccatcgctccgagcgtcgaggcagctagagctgcggattattaaggaactgactaaaatctatcctctaactacagctgtttgggaagtggttattactcgtggcagcaaaggattttcacccgtaatggttgctcaatattgggcaattgaccaactcaagcaactgctgccagtagtcacccaagaaggttggcaaacatccaatctcagacagtggctggaattggaaaaacagaaaacccaaaaaggtgatgcaattccggaaacccatgcagtagatggagtggtactggcttctactcagtttgtccgatatcgacaactcaagggtaaacaaggatggtgggaa

SEQ ID NO: 1730 - DNA, 236 bp, Unknown
  Ga0376086_0041273 JGI
gtcaactaccccgcactccgctcacgctgcgtgacggggcttgcaagagacaaggtttgcaacgcaagagttgactagcacgcttgagcctctatctggcacgcactctcaggtatttccctagcctgagttatctgcaaaacagcttgtcactgtttcgtctaaaaggcggaatcatcctgatagaggtgtgcgaagggactttcaaacttgactcaaggattatctccatgcga

SEQ ID NO: 1731 - DNA, 1308 bp, Unknown
  MIS_10021274 JGI
atggctgtatttgtattaggtaaaggtaaattacctttaatgccttgttctgaaaaaagggcaagaaaattattagaggctaatcgtgctgtagtggtacgggtatatccgtttactattagattaaaagatagatcagatggtattatgcagcccttaaatgttaagcttgaccccggtagcaaagttacaggtattgccttaacaagagatgtagaaacggtaactattgatggtgaaatagtaaaaacggtaaacgttttaaacttatttgaacttactcatagaggggaactaattagttcttctttaaaaactagaaaagcttttagagctagtcgtagagctagaaatactagataccgatctcctagatttttaaatcgggctagacctaaaggatggttgcctcctagtctaaaccatagagtgacttctattttaaatttagtaattaaattaaaaaaattagtaccattaactaatataacacaagaattagttaagtttgatatgcaaaagatggtaaatcctgagataagtggtattgaatatcagcaaggtacgttgcagggttatgaagtacgcgaatatttgttagagaaatataatagaacttgcgtatattgtggtgtgaaaaatgtacctttacaaatagaacatatccaagctaagtcaaaaggtggtaccaatagaattagtaatttgacattagcatgtgaatgctgtaataaaaagaaagataatttagatattagtgtgtttttgaaaaataagcctgagttattaaataatatcttaaaacaagtaaagtcccctctaaaggatgctgctgctgtaaatgctactagatggtcattatttaataacttaaaaaaaataggtttaagtatggaggtaggatcgggaggtttaacaaagtttaatagagtgaacttaggactacctaaaactcatgttttagatgctgtaagtgttggtaaattaaatgttatcaataattggaatatcccatccttaattatgaaatcaacgggtagaggtagatatagtagaacctataataattcttttggttttccaataggatacttaatgaaaacaaaaagtattaagggatttcagacaggagatactgttaaggcactaattacaaaaggtaaaaagataggggaatattttggtaggttaacaataaaagccacaggatatttcactataaaaacacgtagtaccactgtaaatagcttatcttttaagtactttacgttgattcaacgtgcagatggctatagctatactttttaa

SEQ ID NO: 1732 - DNA, 272 bp, Unknown
  MIS_10021274 JGI
ataagtcacccccgcagtaatgcggtatttttgaaaggaaatatggatttaacagactaagttgaatttatttaactacgttgtaatagagtttaagacctacctatgaatgcttcctcagttcatagctctagaagtttaaatcgcagacacgcttagggtaagcacgaaacgggtttagacataatgctgaattacaacattgtcgaggggagattcacagaaatgtgagcgtaacaaggcgcgtaagcgtaaaggatttttaaatggct

SEQ ID NO: 1733 - DNA, 513 bp, Unknown
  JGI24712J26585_10005370 JGI
ctggtcggtggtcgggaccagagagactgtcgcaaacggcatgttggaggctccaaaaacgtcaagaaagcaatcgaaacccgaagaacgctgcgtcgcgcccgtcgtcaccggaagtgctggcgtcgtcctgcccggtttgacaaccggctcagcggccggcggttcctgctaccgagcacgtttgcccggtggaacgccaggatccgaattctggaccagctccagaagatcctgccgatcaccgatgtggttgtagaggatgtttttgcggtgacaaagaagaattgtcggcggtggaacgaaaacctctcgccgttggaggtcggggaacaatggttttatcaggcaaccagggatcgcggactcgatctacacctgcgtgcggggtatgagagaaaagaactccgggagcggttcggcttgaagaagactcagcagaagagtaaaccggtgtttgctgcccacgcggttgatgcgtgggtgatggcagctgacgtcccgggtgcggag

SEQ ID NO: 1734 - DNA, 375 bp, Unknown
  JGI24712J26585_10005370 JGI
gtcaactaccccaccctgaatggtggggcttgcgaacggctaagcgagaccaaacggtagaccaggaggcgaccaatcgattgcagcagcgtttcgggctacatgaacgggtgggtgcttccctggcctgtccctcttccgggcacgccaaaacccgatctgctctctggagcactaagcccgtctcgcaactccgaagggaaatgcgaccccgattcgaccgggaggaggtaatacctgccatgcgtgtacccgtatcagacaccaatcaaacaccgttgatgccgacgaccccggcacgtgcccgtctcctcctcaagcagggaaaggcgaagccgtactggaacaaactcggcatcttcagtatcatcctca

SEQ ID NO: 1735 - DNA, 1452 bp, Unknown
  metagenome genome assembly, contig: NODE_590_length_29055_cov_3.058414, whole genome shotgun sequence WGS
atgaaagtatacgtaatcggatggaatgggttcgggcttgcgccaacgacgccacggaaagcacgcattctgctgaaatcaggcagagcaagtgttgcgtttcgtcacccattcaccatccgtcttaaatataagaccgggtgtgcgcacccggctggaatgagcatcggcgtggacaccgggtcccagcatatcgggatcagcgtcatcagcagagagcaggaaattgttatcagcaaagaggaatacgagctccgctccaccatggaaaagcgggctcttctggagacaaggaagaacctgcgaagaagtagacggtcacgaaaaacacgttaccgtcatccgaaatttagaccggataccaggcgcacctatcaggaaacccagattaagcgaaataaaaatatgacacactggaagaaggagacgaatacatatgagtcgtcgagaccagaaggatggcttccgccatccatgcagtcaaaactggaccatcatatccgtatcatttccagatatcaggaagccttgcctcctgatacgaccttaaggatcgaagttgggaggtttgacgtccagcatatggagaatccgatgattcacggtgaaatgtatcagaagggagcacagtatgaatcagagaatctgaaagcatatatcttctcaagagatggttacacctgccagtgctgtaagcaaaaagccggaacgaaacggaaggacggaacgaccgtccgcctgatcgtgcatcatatcgatttccggagcaaaggtgcttctgataacccgaaacacttgatcacagtatgtgacaaatgccatacgtccgcagcccataaaccgggcggcatcctgtacgactggatgctaaaaaacaaaacagtagcaagaggataccgggatacggcggtcatgaacgtcttaagacgtcggctctggaaagcgttcccgaatgccgaatttacatacggaaatatcacggcagcggacagaaaaactttcggtcttgagaaagctcactgtaacgacgcaacagcgatcgccgcacatggactgaaacagatccgggacattccggatacaacgtattatcgccagatccggaaacagaaacgttctctgcatgaggcaacaccacggaagggacggaaggaaccgaaccgcagcgcaaagcggaatccaaagaatactagccagtccggaggtctgtacctgaatgataaagtgtgggtatttggacagtacggatggatcagcgggttcagcggaacaagcagtgtctatatcaagaaccgggatgggaaatacattcgggttcccgggaaaagccatacgctgatcccggctaagggattgattgcaaggactcattgtaataactgggctgtttatagcgcaaatacgattttatatgacaggcgggaaggaactattaagaccacagaaacataa

SEQ ID NO: 1736 - DNA, 259 bp, Unknown
  metagenome genome assembly, contig: NODE_590_length_29055_cov_3.058414, whole genome shotgun sequence WGS
ttgaataaccgagcatgcgaaggtagaaaatggtgtctgtgcaggttcgcctgcgcagactagttgactagcctaaggacaaggtccctacaagccagtaagggaagccttagtactacgtcttatggagtgaataccctacccgacaagttgtcccatcggtatgggttcgggctacgtatggaacaagagttcaacgacccggtgatagaagctcccggacattggcgaggacaaatcacatcgaaagatgaaccgg

SEQ ID NO: 1737 - DNA, 1242 bp, Unknown
  fermentation metagenome genome assembly, contig: NODE_421_length_49700_cov_20.654930, whole genome shotgun sequence WGS
atgaaagaaataaagtattcatttgtagtagatagtaggggaaaagctttaagtcctactaaatctgagaaagcatggtattttataaggaaaggcaaagcaaaattagtaacacagtacccattaacaattaagttgacttatgaggtagacaatacggatattagtaaactacacatgggtttagacgtaggacaaacaacaggaatagccttagtacaagaatgtaaaacaagaaataaagtaatatttaaaggtgagatagtccaccgtaaagatgtaagtagcttaatgacaactcgcaaaggttatagaaaaaacagacgtagtgaaaagaggtatagacctgttaggtataataataggtcatcttcaagtagaaagggaaggttagcaccttcgataaaaacaagacaagatgagatactaaggttagtaaaaaggttacaaaagtatgtgggtatagacaaagtagtaatagaggatgtgagttttgatataaggtgtttaacagatggctacaaaccgtataggtgggaatatcaaaggggtaataggttagatgagaacataagaaaagcgacattaatgagggataactttacttgtcaggaatgtggtgtaaaagacacaatattggaggcacatcatatagtacccaaaaggttaaaaggtagtgacacaataagcaatctaataacgttatgcaatagttgtcatagtagtgtaacaggcaaagaggaagattatatagataaatttcaaagtctaactggtggaaagcaattaggtttacgctacgcgattcacgtaatgcaaggaaagacatatttatataacagtataagtaaattggtgtcagatatagccaaaacagatgggggtacaacaagtaatagaagaattgattggggtatagttaagagtcatagtaatgatgcaatagcaataacaagtttaaaaccagatacagtaggcgtatacgagtataatattcaaccattaagaaagaagcgaaaatgtaagttagataaaagttcagtaatagtgcaaggggacagagtaatatatactccaaggggtaagttctcaataaactgttatgtaaccgcaatattaaagagtggaaagttaaaaggatattacaagttaactgggttattagatggtaaacgttacggtcctgtaagtgtaagaagtctaaggaaattggtaacagaccgaggtttacgcataagttag

SEQ ID NO: 1738 - DNA, 313 bp, Unknown
  fermentation metagenome genome assembly, contig: NODE_421_length_49700_cov_20.654930, whole genome shotgun sequence WGS
tataaaaatatgtaaataactattagtttttatagacataactgttggtggtttcaagcctaagtgagtacagcattggaaacagtgaagtacaatgaactacgttagtaggaaaagttaaagacttacctttagatgtaaccatcagtctaaagctctaagagttattgaggaagactgttaatctaagtaatattagcataagtattataagaaaaccaaacaccgaaataacatgaactttctattgaccttggcaagaagggaaatactttgaaagaaaggtaggagaaatcctgatgaaagaaataaa

SEQ ID NO: 1739 - DNA, 438 bp, Unknown
  Ga0137379_10004000 JGI
atgtcacaggtgtttgtcttagatacgaataagcaaccgctcaatccggtgcatcccggttgtgcccgcctgctcttgaaacagggcaaggctgcggtctaccggcgctacccgttcacgctgatcctcaagcgtacggtggagcgaccggagcttcagccgctgcgcgtcaagatcgatccaggcagccagaccaccggcctcgccctggtcaacgatgcgagcggggaggtcgtgtgggcggcggaagtgcgggaatatgtcctgctcaagtggcatcaccagtgcgcctactgcgacgcgcgcgctgtcccgctggaactcgaccacgtgcagccgagagccaaaggcggctccaaccgcgtcagcaacttaacactggcctgcacttcctgtaaccaacgcaagggcaatcaagacgtccgcgacttcctcaag

SEQ ID NO: 1740 - DNA, 312 bp, Unknown; identical to SEQ ID NO: 1009
  Ga0137379_10004000 JGI

SEQ ID NO: 1741 - DNA, 768 bp, Homo sapiens
gtgggtgtaccgcagcaatgcgagattttttatgaaaggatatatatggtttttgtattagacaaatctaaaaaacctttagatatgatcacaaacgctgaagctagaatactaattagaaaaaagctagctgtaatccataagatatatcctttcactattaggcttagagacaatagttgtataagtaatgatagaacttataccgttaagcttgatccaagttcaagacatactggagtggctattattgatgataaagatcaagtagtcatgttagcagagcttgagcatagaggtcatctagttaaaaagaatatggatagcagaagagctattagacgcaaaagacgcagtagaaagattagatatagacctgcaagatttttaaatagaaccaagcctaaaggttggttagcacctagcattaaatcaagggctgacaacgtgattaatttcattaagaaatataagaagctcttgaatatcaataaggttatgattgagaatgtaagttttaatgtagctcaaatgagttctaacactaagctttggggtaataattaccaacaaggacctttgtaccaacaaaagcttagaagttttatattcggccgctcaaacggcaaatgtgtctactgcggagctgaggcaaccgagatagatcacattgtgcctagagctaaaggtggaactaatagcacatataatttagtagcatcttgtagagcttgtaatcaaatgaagtctaataagactttgaaagaa

SEQ ID NO: 1742 - DNA, 272 bp, Homo sapiens
gtcaattactcgacaaaaacaaatcgagctcgattgaccagactcagtttatctaacttaactgttagattaaactacgatagataagttatcacacccatggatgcttctccagtctgtggctctgtgttatctatcattgtcgaggagagactagcttagaactttaattgggacattagtctctggttgatagctgtaagttagcgtgcctactgtaaaaggtgggtgtaccgcagcaatgcgagattttttatgaaaggatatatatg

SEQ ID NO: 1743 - DNA, 1284 bp, Chloroflexi bacterium
atggtcttcgtcttagacacaaagaaaaagccgctgatgccttgcacacccaagcgggcacgacagctgcttgccagaggcagagcagtcgtccaccgggtggcacccttcgtcattcggctcaaagatcgccaggtggaggactcggtcctgcaaccgcttgccctgaaaatcgatccgggcagccagaccaccggcatgacgctggcccgtgtggaagacaggagcgagggagccatccaccatgcggtgttgctggctgaagtgcagcaccgaggccacgaggtgcgagcgcgcaaagtcacgcaacgccatgctcgcagacgccgccgcagtgccaatctgcgccaccgggctgcgcgcgcagccaaccgccgcatcgctcgtgggtggctgccgccgtcgctgctttcgcggatcggcaacgtggtgagttggacgaagcgcttgcgtcgttttgctcccgtcacacgcgtggatgttgagtgcgtccgcttcgatacgcaactactccagaaccccgagatcactggcgtccaataccagcatggggagctttttgggtgggaaatacgagcctatctcctgctcaaatatgcgtaccagtgcgtctactgcggaaaacgcgacaccccttttgagctcgatcatatccggccccgtagccgaggcgggtccagtcgcatcacgaacctggcattggcctgtcacgactgcaatcggcagaaaggggcgcaaacggcggcggaatgggggcacccggaagtggaggtgcaggcaaaaacaccgctcagggatgcggcggcggtgaatgccacacgccacaaactcgtccaggagctaggcgtgttcgggttacccgtcggcacctggacgggcgggcgcacgcgctggaatcgcgcccgctttggcatcgcgaagacgcatgccaaagacgcgctctgcgttggagatctcgcaggcgtgcgagagggcaggctgaagaccgtggcgatcacggccaccggacggggggagcattgtcgcaccaattggagcaaacagggcttcccgcgcggataccgcctgcgccacaagcaggtcaagggtttcaagaccggcgaccgggtgcgggccgtcgtgccggacaagctcaagaccaggggcatccatgtaggacgcgtgcaggtgcgcaaaagcggctcctttgatatccagacgcacgagcgggaggtcgaaggagtcaatgcgacctactgttgcctggtacagcgaggcgatggctatgcctatgcgcttgcatag

SEQ ID NO: 1744 - DNA, 332 bp, Chloroflexi bacterium
gtcacgaacccccggatgacatccgggggcttgcagccagaacgctcgtcgttcgcgttgcaagctccatagtgtccagccttagcgtccaatggcgcaggccgccaaatacggacgctccgttcgacgggtcatggcacccagggacgcctcctcaatccctggccctgccgtccagggttaaaaggttcgcaggggtcgagccggtgctctggacccatcaagcccgttgaccattggcgagaggagcatcttgggaatgcctgcccaggatcgtcagacagccccttacggggtcttctccaaagcgcgagaagaaaggaacgaggatg

SEQ ID NO: 1745 - DNA, 966 bp, Unknown
  Ga0072941_1026019 JGI
atgtttgtaggagtaattggaaaatcaggaaaacaattaatgccgtgtagtccacgcaaggctagacttcttttgaagtctggcaaggcggagatcgtgcggtatgaaccgtttacgattaaattgaattacgacacaacagaaattacgcaagaagttactgtcggagttgaccttggtagtaaacatcttgcagtttcggcaacaacagaacaaaaggaggtctatacaacgcaagtagaattaagaacagatattgttgatttgttatcagggagaagagctttacgcagaacaagacgtaatcgtaaaacaaggtatcgtcaggctaggtggcaaaataggaagaaacctgaatattggcttccgccaagtgttcagcacaaggtaaacgctacgatcaaaatattggatacaattagacagtgtttccccataaccaagtttatcgttgaggttgctccgtttgacattcaaaagattaacaatcctgacattcagggaggacaataccagcaaggcgatcagtggggttttgctaatgttcgagagtatgtattgtacagagatgggcataaatgcagggtttgcggaaagtccggtaaattacacgttcaccatatagagagtcgcaaaacaggaggaaacgccccaaacaacttagttactttatgtgaaaattgtcataagggacatcataacagtaccaaactgataaagtttaagcgaggacaagtttttaaagatgcaattcaggtgacaattatttcaaagagtgtatgtgactggctagtacatcaaggtattaggtttgagaaaacatacggatacattaccaaacataaacgcaatcaggttggattacaaaaatctcatttgaacgatgcttttgtgatcagtgggaatttaaatgtcaggcggtctgatgaatttgtgcttcaaaagagagttagagcaaataatcga

SEQ ID NO: 1746 - DNA, 304 bp, Unknown
  Ga0072941_1026019 JGI
ggatagtgtaatttttacgaaacggaaagaaaggatggattgtaagcaacctgtcccgtatagggatggaactttttagtccttgtttactagattgagcaacacaggcaacttgttgctacgttatttgagaatacataggcactttgggatacttgtcctagtcccaaaccctgcggtttgttattaaacagtcctgattggtaggggcagtgtaataaacatacaaaacctcaaaataacattatcgaaggacaccaactcccgtagggagataacatttaagttatattttattatgttt

SEQ ID NO: 1747 - DNA, 1251 bp, Unknown
  Ga0374549_000851 JGI
atgccatgtcatcctgcccgcgcacggcaattactcaaagcaggaaaagcggcggtgtttcgccgctatccattctccatcattttgaaagagcgcgatgggggtgatacgcaatccgttgagcttaaacttgatcctggtagccagacaacgggcatagctctcattgcgaatgaacgggtgatatgggcggctgaactacaccatcgcggtacgcggattaagtacgcgctcgaccagcgtcgcgctgtgcggcacagcaggaggcagcgtaaaacgcggtatcgaaaaccgcgtttcctgaaccgtactcgtcccaaaggttggctaccgccgagtcttgaaagccgcgtggcaaatgtcgagacgtgggttgctcggttgcgtcgatttgctcccatcacggagatagccttagaagtagtgcggtttgatacccaatctatgcagaatccagatgtgagcgggattgagtatcaacaggggacgctggcgggctacgaggtgcgggaatatgtacttgagaaatggaaacgaacatgtgcctattgtggagcaacagaagtgcgattggaaatagagcatattgttcccaaatctcgtggaggaagtgatcgcgtgtcgaacctaacccttgcgtgtcatgcctgcaatcagaaaaaagggacacaaaccgccattgaatttggtcatccacacattcaggcacaagctcgccaaccgcttcgtgatgctgcaactatcaacgcaactcgctggcggttgtatgaacggttacaggcaatagggctaccgatgacgtgcggttctggaggacgcacgaaatataaccgcatccagcaaagctatccaaaagcgcattggatagatgcagcgtgtgtaggggaacgtggaagacatgtacaagttcatcctgagatgcaggtactcgttatccgcgcaatgggacatggcaatcggcagatgtgccgtataaacaagtacggtttcccacgcactagagcgaaaggaagcaaatgggtaaaggggtttcaaacaggggacatcgtgcgggcaatcgtgccaaaaggtatacacaagggtacacacatcggacgagtagtaatccgtgcaagagggtcgttctgtattggaacaatcgatggaatttcctatcggtattgcacctgtttgcaacggacagatgggtatgactatggctttggtagtggactgaagccgctgaaacgtggcacttcatcccaccgctga

SEQ ID NO: 1748 - DNA, 252 bp, Unknown
  Ga0374549_000851 JGI
gtcaatgacccaagccttttcaggtttgggcttgtgagagcaagccgacattgaccagactcagcccgtgtgggctacgataggcgggtcatgacaccgtaggatgcaagccagtcttacgctctgtcgttggtagttaaacaagcagacggtctatgctcgtgctgccagcagaacaagcctccctatcattgtcgaggcacccattaccgccgtaaggcgagaaagcaacggtaacaattgcacaatcac

SEQ ID NO: 1749 - DNA, 885 bp, Unknown
  GENOME_ACESSION: mgm4707306.3 MG-RAST
atgtttatgatatttctattaaataaaaacaagaaaccgctagatcctattcatcccgcaactgcccgaaaattattaaagtatggccaagcagttgttcataaaagaattccgttcacgattcgattaaaagaactcgtggatctggaaccaaagaaatatacgattaaaatcgatccaggatcaaaaacaactggcgctgcgattgtatcagacaacgaggttgtccatttggcggaaatcgaacacaagacaaacatctcaaagaaactccaagatagacgttcgtttaggagaagcagaagaacgcgaaagttgcgatatcgcaagccgagatttgataaccgcactcgagatggaggatggctaccgccatcgctaaatgcaagagtggacaatattttgtctcaggtcaaaaggtatcaaaaactcattccgatcacaagcgcttcacaagagttagttcgattcgatatgcagaagatgcggaatcctgaaatctcgggggttaagtatcagcagggagaactccaagggtatgaagtacgggagtatttacttgataagtttgaccgcaggtgtttttactgcgaagcagagaacatcccccttgaaattgagcatacacatccaaagtctcgcggaggttctaattctgttatcaatcttacgattgcctgcaataaatgcaatcaagagaaaggaaattttactccagaagaatggctaattaaaattaaaagtagacgctcgaaacgatatttactgataaagaaaaacataccaaaactgaagagtgctctaatcaaacctcttaaagatgcggcagctgttaatgcgacgaaaaataaacttaaaagagaactagaaaccatttttggatct

SEQ ID NO: 1750 - DNA, 414 bp, Unknown
  GENOME_ACESSION: mgm4707306.3 MG-RAST
  MISC_FEATURE (204)..(318): Any "n" represents any nucleotide
gtcaactacccgcgattgaaatcgcaggcttgtgttagttatatctaactatagtcatagtttcaatctggttgctgttacagaactaagttgaccagcctaagttcgattttagaactacgttattgaggtgcataccctagaatgcttctccagttctaggcactatggaacgcacattaaacatctaatcaacgggatagnnnnnnnnnnnnnnnnnnnnnnnnnnnnnnnnnnnnnnnnnnnnnnnnnnnnnnnnnnnnnnnnnnnnnnnnnnnnnnnnnnnnnnnnnnnnnnnnnnnnnnnnnnnnnnnnnnnagcgcagaaaaggaagtatgtttatgatatttctattaaataaaaacaagaaaccgctagatcctattcatcccgcaactgcccgaaaattattaa

SEQ ID NO: 1751 - DNA, 1077 bp, Janthinobacterium sp.
atggccgtctgccgcatcgaggaagtcgttgaggccgccggcgtcaatggcccggtgatgcatattttgtttctgatggaattggtgcactgcggccaagccatcaagaagtcgctgcatgcgcgatccagtattcgtcggcgccgccgcggcaacctgcgctaccgcgcgccgcgcttcaataatcgcatccggcgcacgggatggctagcgccatcaacatcggatcgactcggccatggcctgggtggcgcgcctgcgccgtctggcgccaatcacgcatctggcgcaagagttggtccgtttcgacatgcagaagatacaaaatccggagatctccggtgtcgagtatcagccaagcacattgctcggctacgaggtgcgcgaatatttgctggaaaaattcaaccgcacctgtgcctattgcgacgcaaccggccgctgcagatggaacatatcgatgccaaggccaacggcggcccaaaccgcgtcagcaacctgacactggcctgcgagccttgtaataagaaaaaatgcgcgcgacgtccgcgaatttctcaagaaagacccggtgcgcctggcgaagatcctcgcgcagcgaaggcgccgctgcgcaatgccgcggccgtcaatgccaccggatgggccttgttccaggcattcaaaaatgctgatcttccggtggaggttggcacaggtgggcgcaccaaatggaaccgctcgcgccaaggtatttcaaaggcgcatgtcctggatgccgcttgcgttggcatcgtgggcgacgtgcgcggcgcgcgcacaccgaccttgcgcgtcaaatgcaccggccgcggttcgcgctgcaagacgcgactgaacaagtatggttttccgcgtgcctatttgacccgcaaaaagacggcgtttggctttcgcaccggtgacatggtggtggccgacgtaccttccggcaaaaacaagggaatccaccagggccgtgtggcgatccggatgacgggcattttcaacatccagaccggcatcgctgatgcgcagacggtgcagggtatctcacaaaaggattgccgcatcatttag

SEQ ID NO: 1752 - DNA, 289 bp, Janthinobacterium sp.
atacccggcatagccagcgcatcggcaatgttgcgccgctgctttgtgagtcgctgatagtactcaaagctcataagcacatgggccggtcggcctctatccgtgatgaacaccggcccgttgtttgcggcccgttttgcctcgctcgccccttggttgaactcgcggcttgataaggtggtaatggtcatgacgacacccccgtatgctcgaatgatgtagtaatgttactacatcattcgagcgggtgcaagtgtttcagagtcggtaaacggtcagctcagtggac

SEQ ID NO: 1753 - DNA, 828 bp, Actinomadura latina
gtgtcgaactgggcatcgaccccggctccaagcacaccggcatcaccgtcttcaccgacatcggcgggaaccgccggggcctgtacggcatcgacctggcccaccggggcggcagcatccgagacaagatgtccatgcgcgccgcctaccgcaggggccgcaggtcgcggaacctgcgctaccgcgcccccccgctgctgcaaccgcaccaaacccagcggctggctcgcaccgtctctgcggttgcacggcaccgaggtgcgcgaatacctccttgccaagtggatacgcgcctgcgcgtactgcggcgccactggcgtgccactcaacatcgatcacatccgcccccgctccaggggcggctccaaccgggtcagcaacctgtgcaccgcgtgcatcccctgcaaccaggccaaatgcaaccggcccgtggaggagttcctcggccacatgaacaccatcgaccgcattccgcacaccgtcctcatcgccgcagccaccgagcgcggtacctacgctcgcacccgcaccgaccggtacggcttcccccgtctccgcctgccgcgcgcgaagcggttcttcgggttcgccaccggcgacctggtccatgccacggtcccgaccggccggtgggccggaacccacaccgggcgtgtcgcggtccgttccagcggcagccacaccgtcaccacccccgcaggggccgtcaagacctctcgacggctacgcctacaccaccaaacccgaggggccgtgatcagtgctgcggcccggcaggtcagagcaccgctggggccctcccgcgctttcgttctctccccccgctga

SEQ ID NO: 1754 - DNA, 828 bp, Actinomadura latina; identical to SEQ ID NO: 1753

SEQ ID NO: 1755 - DNA, 1287 bp, Sulfobacillus sp. hq2
atggttgtcgtcttagaccagcaccaaaaacctctcatgccctgcaccgaaaagcgggcccgccaattgctggacagaggtcgggcggtggtgcaccggatggcccccttcacgatccggctgaaggatcgcacggcggaagaatccaggttccaaccattgcgcgtcaaattcgaccccggcagcaaaacaacgggggtcgccatccttttggagggggcccaaggccctaaggtcattttcttcgggaagcttgtccacaaagccagcatcaaagccaaactggacgcccggcgggctttgcgtcgagggcgccgccatcgcaagacgcgttaccggaaagcccggtttctgaaccgcaagcgcccccagggatggctgcccccgtcgctggaggcgcggatcggtcaaaccctgcattccttagcgaagctccgaaaactcgcgccgatcacggcgcttagcgtggagcatgtcaaatttgacacccagaagatgctaaatgccgaaatttctggggtggaataccagcagggcaccctgttggggtacgaagtgcgggagtacctgttggagaaatggggccgcgcttgcgtctattgcggcgccactgcggtgccgcttcaggtagagcacatcgtgcccaaaagtcgcgggggcagtgaccgggtcagcaatctggccttggcctgcgaaccttgcaatctggcgaagaacaaccggacggccgaagagttcggttatcctgcgattcaggcccaagccaagacaccgctgaaagatgcggcgatgctgaatgcgacccgctggcggttgtataaagacctcaaagcgaccggacttcccgtggaaggtgggtcaggcggccgcacgaagcagcagcgcatcgatcacggcttccccaaggagcactattacgacgcgctctgtgtcggagaaagcacccccaaacggttcaccagcctgccagcctacgtgcaggtttggaccgccaaaggccggagcaaccggcaacgctgtcgcacggacaagcacgggttcccgattcgccatttgtctgccaagaaagttcatttcggctttcagaccggggacctcatccgagcggaaatacccaacggcaagtataggggcgggtggacaggttctgttaccgtccgcgccacaggccgtttcgacatcgcgatcgcgggccgcaaaattgcccaaggcgtttcgcacaaatactgccgcattctccaacgcggagacggctggcagtatacaacgcaccgtataggtgcttga

SEQ ID NO: 1756 - DNA, 271 bp, Sulfobacillus sp. hq2
gtcaaccaccccgccctgaagggcggagcttgtcgtaagctccacggttgaccagccttagcctcttcacgagactccgttcggtcggtgcacacccaggggtgcttctccagcccctggctctgtgggttcacgttaaaagccagctcggggtagtgcaagcggtgcgtggacggctttcgacccgaccgaacattggcgaggagagatgtgcgcaagcacacgttaccagccccttacggggctccgaaaggagcatcggcgaatggtt

SEQ ID NO: 1757 - DNA, 696 bp, Anoxybacillus flavithermus
  MISC_FEATURE (121)..(220): Any "n" represents any nucleotide
ttgtcacggagcagttgcaagaaagctgttgaacaagggaaggcggcgatttacaaacgattcccatttaccatcatcttgaaaaaatcagtagacgaatcagaaaatgaaacaacatatnnnnnnnnnnnnnnnnnnnnnnnnnnnnnnnnnnnnnnnnnnnnnnnnnnnnnnnnnnnnnnnnnnnnnnnnnnnnnnnnnnnnnnnnnnnnnnnnnnnnatgaagtgttaaagcagacaggattagatgtcgagtgtggaacaggtgcacgaacaaaaatgaatcgtattcgtttagacttgccgaaaacacattattttgacgcttgttgtgtaggcgaaagcacaacaaatcacttatatttcaaaacaaaagaagtgttatttatcaaggcaaaagggcgtggtagtcgctctcgtacaaacctagatagatatggcttcccaagaggttatcttgcaagacaaaagttcttctttggcttccaaacaggggacatggttaaggctgttgtcccaagagggaaatatcaaggcgtttggtttggcgaagtcgcatgtagaaagactggaagtttcgatattaaaggcaaggacggaaagcgtatcgcacaaggaataaattatagatatgtccaagtcattcagcgatttgacggatatgcttatggaaaggggggggcggaacttgcgtaa

SEQ ID NO: 1758 - DNA, 244 bp, Anoxybacillus flavithermus
gtcaacaacccaatgactaaagtcatgggcttgtaagccccatgttgaccagaccaaggcttgaaacagagcctacgttatagatgtcatgacacgttcgggtacttctccagcccgttcctctgtcgtgcaaggttaaacaagcgtggtgggtagcgctagtgtcttgcacataacaagcatctataacatggtcgaggagaatatgacctgctttatgcagaggaaaggggagaaccctatg

SEQ ID NO: 1759 - DNA, 651 bp, Unknown
  Ga0307928_10012696 JGI
atgcctacaactaggtgtggtgcagtgaggagatggcttagagacaacaaagcaatagttgttaatctatgtccttttacaattcaattaaaatgggattgtgagaacaacaagcaagaggttattgttggcttagatactggtgctgttaatgttggctgttcagcaataatcaacaacaagtgcttatatgcttccgagacaaaattgagaactgatataagcaaaaaaatgcaaagacgagccaaatacagaagaaatagaagaacaagaaagttaaggtatagaccagtaaggtttgataatagaacatcaaaaagacaattacctccgtcattacaaagtaagatggattcaactgtaaaagttgttaaacaattatcaaagattcttccaataacaaaggttattgtagagatagccaagtttgacacgcaaaagttacagaatccagaaattaaaggaaaggaatatcagaaaggcgttactgaaggatatgataatgtaagggcttatgtgtttgaaagagacaaatatacatgtcaaatctgcaaaaagcaaggtggaatattacaaacacatcatatcaagcaaagaaaagatggtgggacagatagaccagagaacttagctactgttcataaagattgt

SEQ ID NO: 1760 - DNA, 271 bp, Unknown
  Ga0307928_10012696 JGI
gtaacacattcccaccgactaaagtcgggggcttttcggcaacgaagcctgtgttaccagacttaggaaagtaatctttcctacgttatttgagatgtagaaacccaacaatttgctcagttgttggctctttcgtggcactgtaaacagctctgagggatttggggcagtcaaccacattgcgaagctcagataacattgttgagagcaacattacagtttgaaggaactggcttacagcaaaaatccttcacacaaaaaaatgcaaaaa

SEQ ID NO: 1761 - DNA, 1227 bp, Unknown
  Ga0315553_10003099 JGI
atgttagtgtacgtgcaagaccaggatggcaagcccttgatgccaacccgacgatacggcgcggtgcgtcgctggctcaaatcgggccgggcgaaagtggtgcggcgtgaaccgttcacgatccggctcctgaaccgccatggaggctacacccaaccgctggaggccggcgtcgatctggggtcggctcacgtcggtgtgtcggtcgtgtccgagcaagaggcagtactcgccggtgagttccgtctgcgaacggatgtgagcaagctgctgacccagcgccgccagttccggcgtgcgcgccggggacgtaagacgcgctaccgacagccgcgtttcctgaaccgtaagcacaaggacgagcttccgccttctctgcgggtcaaggtggacgagactatcaagctaatccgcctggtggacagcatcttgcccatcactcactggaccttcgagatcggcagcttcgatccgcacaagttggccgacccggacgtggagggcactggctaccaggaaggggatcagtatggcttctggaacgtgcgagaatacgtgctgtggcgtgaccggcacacctgtcaggcgtgcaagggcaagttgggcgatccgatcctgaccgtgcatcacctccggcaacgcaaagagggtggcagcgaccggccggcaaacctggtaacactgtgcgagacgtgccacaaggcgcaccacgccgggcagccgctcaagctggaagcgccgccgaccctacgggatgcgacacatttcaacgtgatcaaggcgtacgtgatgcgggtcactgtccatctgaaccggtcgatcacgttcggctacatcaccaaggcgcggcgagtggcgcaggggctgcccaaatcccacgtcaacgatgcctttgtgatcgccggaggccaggagcaggcccgatcacactatgtctacctgggcgggttctaccgccgccagaaccgcaaggtgaccaaaggagcgagatcgcacattcgcaacaccatccctcaggcattcggcttcaggcgcggagatcgggtcagaatgccagatggacgacaagggtttatctatggcttgcgcacgtccggctactttgacgttcggcagttggctggcgaggtgttgagccactcggtcagttggaagaagctaatgccgcttgagaaagcgcgtacactacgaatcgaaaggaggaggggttggaaacggcctgcctga

SEQ ID NO: 1762 - DNA, 305 bp, Unknown
  Ga0315553_10003099 JGI
gtcaactaccaccggctgaaagccggtggcttggggagtgactgaaagtcacctaaagtcccaggccacggttgaccagcctcggccagagagcgcattgcgctctaccgggccacgttgggaaaggcacgacaccctggggtgaacgctccagctccaggctctgtcgctggtggttaaaagctcgcgtgtggtagtgagcggtgctgccagcataacaacctctcccaacattggcgaggagcacgccctgatgggcgactacagccgcaaggctgacttatccgagaggattgagcatgtta

SEQ ID NO: 1763 - DNA, 792 bp, Unknown
  Ga0209985_10000066 JGI
atgcaaagagcttttgttctatcttctaccaaaaagcctcttatgccttgccatcacgcagaagcaagagagctgctacgtgatcgaaaagcagcagtctacagaagaatctctttcatgatcatccataaagagcgctcagatggggatcttcagtccattgcgctaaagcttgacccagggagtcggacgacaggcattgccatggtcggggaatttaaaagaggaaagcgccttatcttcgcagctaacctttctcatagggggcaagctgtgaaagatgcgctcgaatcacggcgatccctaaggcgctcgcatagggcaagcaagacaaggtatcgggctccaaggtttttaaatcggactcgccccataggctggcttccaggaaacgccttaagagagttttcactacccatgagcttttcatcgggcggaagaacaaagtttaacagatcaaagcaaggctatcccaaagatcattgggtcgatgcagcttgcgttggaataacgggcgaaaaggtttatatcgcgccttttcataaggcttcaattatgagggcagaatcaagaggctcaaggcagaaatgccttccagataagtatgggtttccaagaacagcgcccaaggcccaaaagcgcgtctttggctttcagactggagatctcgttgcagccaaagtcacgaaaggcaagaaggcgggaagctatcaggggtgcgttgctgttcgttcaactggcaactttaacatcaaagcacagggggcaggttgtccaaggcataagctataa

SEQ ID NO: 1764 - DNA, 271 bp, Unknown
  Ga0209985_10000066 JGI
gtcaatcacccgcccctaaaggggcaggcttgtaagaaaggagactgatttcatgcctagttgacccgactcagtcccaaaaggggctccgttacgagcgaatcacatagttacccccggatgcttctccagtcctgggctctaaggttggcggttaaacagatcgaagaggttaagtcagtgccgcaagcaagtaaaccgctcgataacattgtctaggtgaccattacctgcgaaagcggagaaccgaaggtagctttaaatgcaaaga

SEQ ID NO: 1765 - DNA, 1245 bp, Unknown
  Ga0307379_10050423 JGI
atgttagtttttacactcaacaaacaaggaaagcctttgatgtcttgcagtccctgcaaagcaaaaaggctgctcagagctaaaaaagcaaaagtcgtaagaactacaccttttacgatcaaactgctttatggttcaacagggtataagcagggaattacagctgggatggatacaggtagtaagaaaattggtgtagctgctgtatctgctgatagaattctctatcagtcagaagtagaactgagaaacgatataacaaagaagatgaaacaaagactatcttaccgcagaacaagaaggggtagaaaaaccaggtatcgaaaaccgcgtttcctcaacagaggaaaagcaggttttctggcaccgagtataaagagtaaaattgaatctcatttgagagaaaagagatttacagaaagtattttaccagtatcaaagtggatacttgaaactgcaagtttcgatattcatcttataaccaatcctagtgtagaaaaaaaaggctatcaagaaggtgaacaaaaaggtttttacaacacaaaagcgtatattctgcatagagacggatataaatgtcagaaatgtaaaaagagtaaagttaagttacaggttcatcatattatttcaaggtctaacaaaggaactaatgaaccaaaaaacctaataacattatgtgtagactgtcatgaaaaacttcataatggtgacttcaccattatgggaagtaaatcaaaaacaaaacatgcgacagaaatgggtataattaaatctcagttaaagaagaggtttggagaattcaaggaagtttttggttatgagacaaaatactggagagagcaagttttgggtttacccaaaacccattacaacgatgcaatcagcatcgtttgtaacggagaacaagaagagattaaaatattgaataatgtgatttacaaaaaacatgtttccagaggagattatcaacaaaccaaaggcaatcattctgaaaaaaagataccaaacagtaaactgtttgggtttaaaaaattcgataaagtaaagtataacaatgttttatactttatcaaaggcaggatgagtagtggatatgctatattgtcaaatgtatttggagagaaggttaaattaaagccaatacctaagtttagtaaaatggagagaataaatgcaagaacaacaacgcaggtggcaattcatcccccacctaaaggaaggggttttcttgccacaacaggataa

SEQ ID NO: 1766 - DNA, 293 bp, Unknown
  Ga0307379_10050423 JGI
gtgaactacccctgcctaaaggcagaggcttccagaagcctaagttcaccagatcactaataggagaagaagcagtaaaaatattagtaaccgataagaaagaattaggcaccctggggtgccacctcagctccaggcactgcggagattaattaaacagtcttaaagggttatagacagtgttaatctcattaaaacctttcattatctgatcgagaggaaggcgtaagctgagtttgatctcacaaactcagccacgcactacctaaggagaggggaaaaactaaatgtta

SEQ ID NO: 1767 - DNA, 1785 bp, Unknown
  Ga0113559_100101 JGI
atgaccaattttaaattgagattatattataaaggaaataaaaatatgaattatatggattttgtattaattgtggataaaaataataaaccatgcataccaataaaaaatggtaaagcaggttatttattaagagaacataaagcagaaattataaatcacgagccattagttatcaaaagaactgatgattataattcggatttagaaaatagagatatatttgaattaaaagtagatagtggatatttaaatatcggattttccgtaagcgataatgagcacgaatatattgcaggtcaagttgaaatgctaaacggaatgagtaatagattgttagaaagaaaatctatgcgtagtttcagaagaaatcgtttacgttatagaaaaaataagaacattgattataaaacagtacataatcctacttataaaaatggaaatgaagatggatggtttgcaccgtctattgtacataaaatggaaacgcatatcagaatcattgagcaattaaaacaatgggttccaatcgataaagttattgtagaggtggcaaattttgacattgctgcaatggatgcatatttaaaggacggaactattttaaatggaaaagattatcaaaatggtgaaatgaaaggatatgagaatgttgtatcttatgtaagagccagagataattattcttgttacttttgcaataagaaaaagaaaaaagatggtacactaaaagagaaaccaaaaagaatagaagtgcaccataaaataccaagatcctggggtggtactaataatccaggaaatttgatttgcgtatgtcaaggatgtcatcagaaaatacattcgaataataataacaacaaatattttaaagaattattagaacaagctttacaagaaaatacatttaaagattctacatatatgaatattgttagatgggaattattaaacagacttactgaaaaatatccagagcttgatattgaagctgaatatggttataacacaaaaattaatagaaaagaagcaggtttgagaaaattccattataatgatgcagtttgtataaaagaatttaagaatataactttatctaaaaaagtatttattgtcgaacaaaaacgttgtaatgatagaaaaatggaaagttttgcagatgcaaaatatatagattcaagagatggtaaaaagaaaaaaggaaatgatctaaaagtaattaggcatagtactaaatcaaaacgctctacaaataaagaacatattgataatgaaagaatctttagaaaagagaaagtatctaagggtaaaatacaatttgagtgtcatttatattgcgtaaaaccaggagatttaatatacataaaagaaggtaaacataaagggaaaattgcagaagtttctacaatacagattgtaggcgaaaaaattcctaatccgataattgatattaatgagataaataataaaaaaattgatttcaacagagagttgaaaaaaagaaaaacaacttctaatatgactgattatcaaaaacgttttgcaaaatatcaaattagatttacatataaagaatctgatgcagatggaccatctataacgcttacgcaaaaagaatatgaaaagcttaaagagaataaatcagatagagtaaaaattattcgtaccagacgtggattagtttggagagagtacgacagacttacatatgaagccgaaaatatggatcaggaagaaaagaaattagaagtaaaaaataagaaacaagaattaaaagctgcataa

SEQ ID NO: 1768 - DNA, 1785 bp, Unknown; identical to SEQ ID NO: 1767
  Ga0113559_100101 JGI

SEQ ID NO: 1769 - DNA, 1296 bp, Unknown
  human gut metagenome genome assembly, contig: NODE_2190_length_16758_cov_18.186733, whole genome shotgun sequence WGS
atgccaaacaaagtgtatgtactcaacaagcacgggcgtccgctgatgccctgctccccggcaacagcccgtcatctgttagatgacgggaaagccaaagtgaagaagaggacgccctttaccatccagctgctttttggcagcaccggctatacgcaggagattattctcggtgtggatgccggaagcaaaaccatcggcctttcggcttctaccgaaacggaggaactgttctccgctgaggtaaagcctcgcaacgatgtggtagacttactgtccacccgtcgagagtctcgtcgagccagaagaaaccgcaaaactcgctatcgtaagccacggttcgacaaccgcgtgcggagcaagcataagggttggttggctccctccgtggaggccaaaatccaagagcatattactgctatcaaaagagcctgccgcattttgcctgtcagcaaagtggtcgtagaaaccgccgagtttgacccgcagcttatcaaagctgtcgaggaagggaaacccatcccgcaaggagaggactaccagaagggcgagatgtatggtcactacaatgtgcgccagtacgtcttgtggcgtgatggctatgtctgccaatgctgcggagcgcatgcgacccataagaaagaggtgcggctccatgtgcatcatctggagagccggaaaaccggaggcgacgctcccagtaatctcattaccctatgtgataactgccacgagaaattacacaagggcattatcacggcagtggacctcaagaagcgtaagcgccgttcctcacgggatgccacattcatgggcatcatgcggaagactttgctgcaaaggctgtgtgctgaactaaccattcctgttgccgagaccagaggctacatcacaaaggcaaccagagaaaagctattggttctgcccaagagccatactaacgacgctctggcaatcgcgcagggtccacaggggttccgcactggataccttccaagcatccgacaagcaacccgcatttataccatccgacccgtgcggcatcataaccgacagctgcacaaagcaaccatcctcaagggtggtgtgcgaaaagctaatcaggcggagaagtatgtctacggcctccgcctctacgacaaggtgctttacaacggtattgagtgctttgtttggggcaggcggagcagcggctctttcttgctacgaaggcttggtggagcaaaggtcaaggatggcgtaagctacaagcatttaaaattattagagcgcagtcagaattatctgatagcgtaa

SEQ ID NO: 1770 - DNA, 291 bp, Unknown
  human gut metagenome genome assembly, contig: NODE_2190_length_16758_cov_18.186733, whole genome shotgun sequence WGS
gtcaataaccccacggctaaagccgggacttgtggaaacacgagccctgattgactaccctaagtgcttcgagcactacgttactcaagaatgtatgtataggcaccggtggacgtttgcccaaatctgccgctctgcggtgtgtgattaaacagctctgagggtaaggagcagtgttgcacgcaaaaaccttgagataacattggggatgggtaccttacggccaaaaggctgagcggcttaatttttagccgcaatcttgaaaaggaggaaggcatcatgccaaacaaa

SEQ ID NO: 1771 - DNA, 1314 bp, Unknown
  Ga0137365_10001047 JGI
atgaaggtgtttgtactatcgaaagaaggaaagcccttgatgcccacaacgccacggcgcgcgcgggtgtggcttaaggcaaaacgtgcccgtgtcgtgcgccgagaccctttcaccattcggttgcgctttgccacccagcagcatacacaaccggcgaaggtgggcgttgacaccggctcgaaacacgtcggcatcgctgccatcaccaatggcgaggtggtattccaggccgatgtccatctgcgtgatgacatcgctgaaaagctgaagcaacggcaccggtatcggcgcaatcggcgggggcgcaagacacgctatcgtgaagcgcgttatgacaatagacgccgacctgatgggtggctgcccccttcgctgcaatccaaatcacaggcgaccgtcagggctgtgcgcttcatcgccttgttcttgccggttggccagatcacagtcgaagtcggtagttttgacacccaaaagatgcaaaagccggacatcgctgggattgagtatcagcagggcgagcttgagggctacctgctgcgtgaatatctcctggagaggtttcagagaacgtgcgtgtattgtggagcccaaggggttcctttagaaatcgaccatctgattcccaaagctcgtggagggtcgaacagagcatcgaatttgacgttgtcgtgccgtccttgcaaccagcgcaaaggtcagcaaacagcggcggagtttggcttcccgggcgtgcaggcaaaggctcgtgttccgttgaagcatgcagcgcatgtgtcttcactgaaaagcagggtgatccatgacctgcaagcgatcttcggagagagccaagtgagcatcacatacggctacgagacgaaatacaaacgcgtccaggtgatttctgcccaagtcccactcgaacgacgccgtggcgattgcctgcgagatcggcgaggtggtcaagccattggaaatagtccatcagatccgctgtctaggacggggccaatatcagcgtttcaatggtctgcacagcgagcacaagtgttgggccccgcgcactttgcgcgggttcaagctctacgaattggtaaagaccaaaggaggcgtgggttacatcgcgggacggcgggagaaaggagcgttcgtcatcaaagacgtcatcagcgggaagaaagtggtcgaggtcacgccacgcaaattggtacggctagcgcgtcccacccagggctggataattactcgactgccggtcctggagagcatcagaaaggcgagcggcgcttcctccccaagttgaaacggggggcacccgcgccgccatga

SEQ ID NO: 1772 - DNA, 306 bp, Unknown
  Ga0137365_10001047 JGI
gtcaatgacctccctataaaacggggagacttgtgaggggttcgccccttgcaagccggattgaccagacggcacctctaagccagtcgcgccgagaaagcgagcgtcgtggctggcgctgatgaggtgagcgatagcatcaagcgttgcagttcgcacccagggatgctgccccagttcctggctctgcaacctctgacttaaagaactgcggtcgaggaacggtggtcagaggaaagtaccgggtgctatcaccgtcgaggggatcgctttcactcatctcacaagagaggagccttacctgat

SEQ ID NO: 1773 - DNA, 933 bp, Unknown
  Ga0070717_10000790 JGI
atggctaccaacgtttttgtcatcaatctgaacgggcatgccctgatgccctgccatcctgctaaggcacgcaagctcttgcgagatggcaaagccagagttattgctcgctgcccctttaccatcaaacttctttgggactgtgaagagcaggtccaggaagtggtgctgggcctcgataagggcagccactacacggggttctgttgcactggcaaggggcagattctcttatctggcgtgattcagcaccggcaggatgtgaaagacaaaatggagaatcgttgcagcaaccggagaaatcgtcggaagaggaagtggtatcgaccggctagattcagcaatcgtggatctagcaagcggagcgggcggctaccgccttcgatcaagtcgaatgtggaagaggtgatccgtgtcgtccggcagattccacttccgatcagcaagatcacaatagaggacgtccgggtagatatcgctcgcttaaacgattccacgcttgccagaagtcgctatcaggaccccacacggctcgatgaaaatcttcgtatggcctgcctcatgcgagacggctacacctgtcagcagtgcggcaaacaaaagattcgtctcgaagcgcaccacctcatcttcagagagcggggaggaaaggatacgctgaataacctgctgactctctgtgcagcctgccataaaaagcttcatcagaacaagatccagcttaaggcgacgggggtgagtgggcgtctcgatcagatcgcccaacacactatgcaaggcaagagctatctctacgccgtccttggcacacaggcagcactctctaggctttttggctaccagacggcaactctgcgtaaagccagggatctccccaaaacacatgacgctgatgccctctgtcttgccacctacgatacggcgagacggtag

SEQ ID NO: 1774 - DNA, 242 bp, Unknown
  Ga0070717_10000790 JGI
aatagtgcctaaaaatctggaacgtctcgtaccggattcatggcactaccagcgggcttgtttgtcagcagcagttgagatggccatgacaccaccagatgttgctccagtcgggtgcaactgtcggcatccattaagggtagcggaaacgcgaatgtgtggatgctgtaaaaagccacttcaacacccgcgaggggcatcatactcctaatcaaggagggcttaacgccatggctaccaac

SEQ ID NO: 1775 - DNA, 717 bp, Unknown
  Ga0211664_10024503 JGI
gtgagagtcttggtgctcgacaatcagaaacaaccgctgatgccttgctgtcctgcgcgagcacgccagctcctgcgtgatggcaaagcagcggtgtttcgtcgttatccgttcactatcgtattgaaaggacgacagggcggtgagatacaacctgtttcacttaatgtcgatccgggcagcaaaaacacaggtattgcacttgttgcgttattccaaggtggccacgctgcgctctacggtcagcatattgtccatcgtggacaacaaatcagggatgcactcgaaaaccgtcgcgctacccgtcgttcacgccgcaacagaaaaacacgctatcggaaaccgcgttttttaaaccgaacccgcccatttggatggctaccaccatccctaatgtcacgagtgcacaatgtggaaacgtgggcgaaacgtctaagcaggttcgcgcctgtcacgtcagcgaatgtcgagacggtgcgctttgacatgcagcttatcgaaaaacctgacatcgtaggaatggactaccaacaaggctcactgtttggctgggagttgcgtgaatacttgctgtatcgccaccagcatacctgtgcgtactgtcacggcctaacaaaggatgcggttcttgagaaggaacatatcatcccaaaaacattaggtggctcaaaccgactggcgaaccatgtcatcagttgccgcacatgcaacgaggac

SEQ ID NO: 1776 - DNA, 288 bp, Unknown
  Ga0211664_10024503 JGI
gtcaacgacccacgacttattcgcttagcgaattaagtcggagcatggaagcctgagttgaccagaccccatcgggtaactgatggagccgttatcggagaatatataggcaccgtgggatgacttgccagttccacgcgctgcggaaaacgattaaacaggcgtaatgggttaagccagtgtcgtttttattaaaccttcgaataacagggtcgaggcaaacataacccacttcggtggagaacgtctggtaacagacattaattttggagtttggataacgtgaga

SEQ ID NO: 1777 - DNA, 1320 bp, Unknown
  Ga0181555_1021736 JGI
atgttagtttttgttctgaacaaacatggcgaacccttaatgccatgtagtaatagaaaagctagacttcttcttaaagaaggtaaggctgaaattcattcatacaaaccattcacaatccaattgaaatttggtagtagtggatatgtacaggatgacgttgaaattggtgtggatactggattcacaaacgtaggaattgctgtcactactgaaacaaaaatatttcatgctaatgagattaagtttcgtaatgacgttagcgaattattaacaactcgtaaatcttatcgcaaaggtcgtagatatcgcaaaacaagatacagacctaagtcttttgcaagaagttctaaacggattttctgcatgaaacagaaaagatggattaaggttaagattaaataccgtggatatgatgattggttgtcccctagttatttagctaaggaagctaacttaattaattgggttgagaaatacaaaaaacgtgtaccatgtagtaagctaattcttgaagttgggcattttgatgttgctaaaataattaatccagagattagtggcaaagattatcaagaggggtcacaaaaaggatttgagaatgttaaggcatatgtgcgtcatcgcgatgaatacacgtgccaacattgcaagggcaaagaaaaggacgtgcgtttagaagtgcaccacactattttcaaaagtaatggtggttcagataagccagataacttgatttgtctttgcaaaacttgtcatgataatttgcatcaaggtgtaattaagcctaaacttaagattacaaaatcttacaaagaagcaactttcatgaatatcttagcatcgagattgagagaattctacccagaggctgagttaacttttggttatgagactaagttgcaccgcatggaattaggtttgccaaaatctcatgcgaatgatgcgatagcggtaacaaacattaagtctataccgcaagaaaagattgaggttttgtacgttaagcagtgccgtaagaaaaaacgtagtcttcatgaagctaaaccacgtaaaggtagaaaagaacctaacactacgtcatcaagaaatgctaaaaacacaaaagcagttggtaacatttgtctattcgacaaagtctcgattgataatcaagttggatgggttagtgggtttacgggtgggaattgttatgtggtggattttagtgggaaatacttaagttttaaaaatactaaaggtacagattcaatacggattaacatggggcgactaaaagtaatccacagaaacaacaattggatttctgagattagataa

SEQ ID NO: 1778 - DNA, 286 bp, Unknown
  Ga0181555_1021736 JGI
gtcaagatacccacgcccaagggcgcgggcttgtgaaagccctacttgactagattcagtgagtagatgttcttagggatatctcgaactacgttatgatagttatctatctgttggatgataccaaagtccaacactatgcaggctctgtaaacattcctctttgggtggggaaagtcatcctgaatatccttgcggatattttggaagttctcgtaacttcacagctatcataacattatcgatgggtaataaactttctttagaaaggaaaaactttatgtta

SEQ ID NO: 1779 - DNA, 843 bp, Chloroflexi bacterium
atgtctgtctatgtcaaaaatcaagatggggcaacactcatgccctgcacagaggccaaagcacgcaagttgctagaagcaaagaaagccaagattgtagactatcgtcctttcaccatccaactgacttggcagtgcgaggggcggacccaagaggtgacctgtgggatcgataagggcagcagtgccacgggtctcgcctgtgtgagccatggcagagtgctgctggccgcagagatccatcatcgtagggatgtcaccgacaaaatgcaggatcggcgggatcgacgtaaaagccgccgggcacgtcgctggtatcggcctgctcgctttctcaatagggcttcaagccgacgcagcggacgcttgcctccttcgattaagaccaacgtcgaggagatcattcgtgtcgtccggcacattcctttgaccaccgtctttggctaccaaacctccgcctacaggaaatataggaacttgccaaaaacgcatatcatcgatgccttgtgcatcgcaaccatgccgaccggcgcagtggttgctgtggagccgaagaatgtgtaccacattcgatttcgtgccaggcaaacacgcaagcactatcacagtcagccgcaaaaaggcaaaggccgggttaaataccaagtcaatgaggagttacaaggctctcgcaaaggagatttggtcttggtcaaaggcaaatatgtcaagctgattcactctatctattccgacggctatttggcctttccacgtgtcaagggagaacccaataaagcactcccgcgagattgtcgcatcttagaacgagaagggacgattttatgggaaatggtgggataa

SEQ ID NO: 1780 - DNA, 249 bp, Chloroflexi bacterium
gatctacaatagttcctaaaagtatggagtttacggacatcatattcaaggagctagcagcgggctaggctagtcctagcagcagtttgccaggtgatcacaccttgagatgttcgctccagtctcaagctctgtggctccagtttaagggtagccgaaaggtgaaagtgattggagcacgacaagcctgatgaacactcgcaaggagcaactcactcttgacagaggagggcttacagtcagatgtct

SEQ ID NO: 1781 - DNA, 615 bp, Streptomyces sp. HG99
gtggctacgttccgtacaggacagcagacccacccgactgtgcttcctcagcagtcggctctggaacccggctcagcagacaacctcaggagcatggacgaaacgggagccgggcgccgcgacgcggcacccggtacgggacatgtgcgaggggagacgcccggcagttcacctgccgctgggcgcgtcacctcggaccgtccggtccgggaggagggtcgtgaggcccacccatgtgtatttgtactcgacaagcacggcatgccgttgcagccgtgcagtccggcacgcgcgcgcaagctgctgcggtcgaagcgggcagttgtacaccggcacacgccgttcgtgatccagacggttcaccggttcaagaccggggacttcgttcgggcagtggttcccactggcaagaaggcgggaacccatacgggccgggtcgcggtccgcaccaagggcagcttcaacatcaccacccggcacggcattgtgcaggggatccatcaccggcacgtccgcctcctccagcgagctgacggatacgcctacaccacagagaaggaggcaggggcctccccaggcatagcctctgggaaatccgcccctcgtagcgcatga

SEQ ID NO: 1782 - DNA, 300 bp, Streptomyces sp. HG99
gtcacaggcttctccactcgaagagtgggaggcgtcggcccatggcggccgacgcctgctgtgaccagcgccagccatcaccaaataggaggtgaccttggtggctacgttccgtacaggacagcagacccacccgactgtgcttcctcagcagtcggctctggaacccggctcagcagacaacctcaggagcatggacgaaacgggagccgggcgccgcgacgcggcacccggtacgggacatgtgcgaggggagacgcccggcagttcacctgccgctgggcgcgtcacctcggaccg

SEQ ID NO: 1783 - DNA, 744 bp, Unknown
  Ga0370532_0143 JGI
atgtccaaagtgtttgtaattgattcagaaaaaagacctttagctccaatacatccggcgcaagcaagacaactgttaagaaataagaaagcagccgtttttaaacgctttccatttactttgattcttaaaaaatccgctattgacgttactgtttcactgctcaggctaaaaatagaccctggtgctaagcatacaggaattgctttggtgaatgactcaaggggtgacgcattgggacaaaaaaatggggcaagccctaataacaacacgataaatcgtgatgcttccagatcaacgcaagagggcttgccccatttttccagtcattcccccggtgaagttgtctttgctgccgaactaaagcatagaggttttgcaatcagagagtctttggcttccaggagacagataagacgcagcagacgaaaccgtaagaccagatatcgtcaaccaaggtttttaaacagaacacgtcctaaaggttggttagcgcctagcttacaaagtcgagtcgaaaatatcaaaacctgggttaacaaactgcgcaaggtagcccgaattgaagcgattagccaagagcttgtacgttttgatatgaagaaagttggtgtgtacctcggaaggattgcaacacgtgcaacaggtagtttcaatatttcaaccaaagacggattagtccaaggaattagccacaagttttgtaaacacattcacaaaaaggatggttactcgtatgcctaa

SEQ ID NO: 1784 - DNA, 382 bp, Unknown
  Ga0370532_0143 JGI
gtaagcaacccctgcctaaaggctaggggcttcgacaaatgttgaagcccagcttaccagactaagtacttcgtgtactacgttcagaataagtgttaaagtttctacctacaaatgcgtagctagtttgtagctctagaaccaaaagattaaacatctgtatgggttaaggaagtgtcttttggatagtaccccttcggggtatgcgcaaagcgcacggcttgaggccgaacggcagtcgctcctgggggaaaccaacgccagacacctacggagggaaaccctcctgcatggctagcgctccccaagaccgcgctgcctcagcgattctgaacattgtcaaagctaactttacccgtaaggagggacatttatgtccaaa

SEQ ID NO: 1785 - DNA, 800 bp, Oxynema sp.
atgtcaaattttgtttttgtcttggacagaaacaagcggcaacttgacccagtgcatccgggaaaagctcggcgactcctctgtacaggaaaggctgccgtatttcgccgttatccgttcaccatcattctcaaagaagcctacccagacatacccgtgcgggacctggaacttaaactcgatccgggttctcaggtcacaggaattgcgatcgtacagggcacgaaggtaatcttcggggctgagatcgaacaccgaggtcaacaaatcaaagatgcagcagccgtcaattcaacccgatgggcgttgttcaatgctctgaaacaaacaggcttgcctgtggcgacaggtacggggggacaaaccaagttcaatcggacgcgattagacctacccaaaacgcactggctagatgctgcaagggttgggaaaattgattcacttaaagtcttgaccaccaaaccgttgttaatttcagcaaaaggacatggtactcgatagatgtgcgggacggataaatatgggtttcctactcgtcatcccccctttagttccccccttaataaggggggttaggggggattcataaaagatttcagactggcgatctcgttactgccacggtcacaaaaggcaagaaaatagggtcttatgttgggcgagttctctgtcgcgcatcaggccactttgatattgtgactcgattgggtcgggtatctggaattagccacaggtattgccaacccattcacaaaagggatggttatgcttatgcgttcgctcataccataggcggctaa

SEQ ID NO: 1786 - DNA, 265 bp, Oxynema sp.
gtcagcccccccggctgaagcacgcgggcttcatgcttccagcttcagtaggggcgtttcgcgaaacgcccctacccagcctaagtcttaactgactacgtttttaaggtcatggcacctacaaatgctttccagtttggaaccctgccgttaacggttaaacagccctaggaggggtaaggcagtgccgttagcccaacaagccctaaaaacattggcgaggaaaacattacccgttttacggagaccttcaatgtcaaatttt

SEQ ID NO: 1787 - DNA, 963 bp, Unknown
  marine metagenome genome assembly, contig: NODE_793_length_18947_cov_12.879862, whole genome shotgun sequence WGS
atgaatcattacgtttatgtacaagatcacacaggacaaccactgatgcctaccaagcgtcatggctgggtgcgtcgtgcattgcgtgatggcaaggcaaccgttgtgaaacgctcgccttttacgattaaactcacttatgaaagtggcaatgaagttcaggatgtgtcacttcatcttgatgcaggatacgctaatatcgggttttctgcacaagcagaatcaagagaattactcggcggtgttttagagttattaaaaggtatgtcagaacgcatcaaagaacgcgctatgtatcgtacacagcgtcgttctcgtttgcgttaccgcaaacctaaattcaaaaagggtggtgattttgtttctaaccgtcccgatggttggttagcgcctagtattcagcataaactggatagtcatttgaatttaattcgtaaaatccagcagattttaccaattacctctattcaaattgaaaccgcgacgtttgatattcagaaaatcaacaatcctgacatcgaaggcgctggctatcagcaaggcgaacgattaggtttctggaatcttcgtgaatatatccttcacagagataaccatacttgccaaaattctgactgtaaaaacaaaagcaaagaaaagatccttcaagtgcatcatatcggcttttggaagcaggatagaagcgaccgtccagcaaacttgattaccttatgcaccaaatgccatacgactaaaaaccaccagaaaaatggcttcttgtatggttgggaaccacgcttgaagagcttcaagcctgaaaccttcatgactacggtgcgtcgtcgtttaatcatccaagcaagagaaatatttgacttacctgttactgaaacctttggttacttaacaaaagcaagccgtattcaaaaagagttgcctaaaagccatcactatgatgcgtttgcgatgggtaacgcaattaca

SEQ ID NO: 1788 - DNA, 281 bp, Unknown
  marine metagenome genome assembly, contig: NODE_793_length_18947_cov_12.879862, whole genome shotgun sequence WGS
gtcaactaccccgccctgaagggcggggcttgtgaaaacaagcccagttgaatagctcccttatttattaaggagacgttgtaggaggaatagataggtgttctgttatgctccacaagtagcaggtgacacggaaacggattaaaaaccactgaagggtaaggtggcgtgttcgtttcagcaaaaccttccgcaaccgagcgatgtggctctacagccgttaggctgacttatcgttaatacgaattgttattactaaaaggtaaaatatgaatcattac

SEQ ID NO: 1789 - DNA, 888 bp, Unknown
  Ga0101770_1058525 JGI
  MISC_FEATURE (358)..(358): Any "n" represents any nucleotide
atgtatcgtagaattaggcgcaatagacttagatataggaaacctagatttgataacagaatttcatctaagaaagaaggttggttagcgccctctattaaacacaagttagattctcatgttaggtttattaattatcttaaaaagatattgcctataactaacatagtcatagaagtggcaaattttgacacacataaacttaaaaacccaaacgtagttggtgaaggttatcaacaaggtgaacaacaagatttttggaatgtaagagaatacgttctgtatagagataattatacctgccagctatgtggcaagaaaaacaccatacttgaggtacatcatataggctattggnaacaagatagaacagatagaccaggcaatctaataacattatgcaccaaatgccacaatcctaataatcataaagaggaaggtaaattgtatggaatgaagcctgttcaaaaaccattaaaggacgcaacatttatgtctactataagatggaaactggtcaatgcgctgatgtgtgactacacttacggttatattacaaaatccaaaagagtaagtcatgatttggaaaagacacattataacgatgcattttgcatagcaggtggaattaatcaacagagaatagaacctatctattttgagcaaattaggagaaacaatcgttcactcgaaaagttctatgatgcaaaatatgttgatataagagataagtctattaaaacaggacaagagcttttctgtggtagaaggacacggaacaaaaacttaaatgaagaaaatcttcataagtatcgtggagctaaaaaatcaaaaggcagaagaaatattcgtaagcaaagatacgcttatcagcctaaagatattgtt

SEQ ID NO: 1790 - DNA, 223 bp, Unknown
  Ga0101770_1058525 JGI
  MISC_FEATURE (138)..(138): Any "n" represents any nucleotide
gtcaattacccaccgcccctagaggcgggggcttgtagaaatacaagctcggttgattagcctatgtcattagcttttgctaatgattagttatagcagaatatatagtcaccgtgggatgctccacaagtcccatgntctgagggtaatggttaaacatctctgaggggtaggagaagtgctgttaccattaaacctgctataacattggcgatgtggacct

SEQ ID NO: 1791 - DNA, 1455 bp, Eubacterium sp. An3
atgacggggcattcgctccgtcccatgggaacgcgtaagcgaaaggagggaaactctatggtatttgttgtatctgcaaacggaacgcccctgatgccgaccagtccttaccgtgcaaggaagctgttaaagaaggggcgcgcgaagatctaccagtaccatccgttcaccatccaggatacagaccgggaagacggggaagtacagaagatcgaatactgcacggacgtgggatatctccatgtagggatctccgtgaaatcagaaaaacatgagtatctggggctgcaggcagacctgctgcccgatgaaacggagcggcacaatgccaggcggaagtaccgccgtacccggcggaaccggaaatgctacatgaagccccggtttaataaccgtaaaagagagaaaggctggctggcaccatccatccgccataaggtcgaggcacagctgctgctgttatcgaagatcctcgctgtctgcccggtcgtatccgtgtggctggagatggggaagttcgacacgcagctgctaaaagccctcctgcgcggggagaagccgccggaaggagcggagtaccagcagggagagaggtatgggatcgaaacactccgggaagcggtctttaccagggaccgccatacctgtgtattctgtgggcgggggatcaaggaccatgccatcctgcatgtccaccatgtcgggtattggaagaaagaccgcagcaaccggcttgccaaccttgctacctgctgtgagcagtgccatacgccagcaaaccaccagccggacggcatcttatatggaaggaacccaaactttccgtctctagcaccggcaacttatatgtccatgatccggtggcagatgctcgcgatggtgaaggagatgcacgataacgtccatatcacttatggtacacggacaaagatcgagcgtaagaaacgccatttgaaaaagacgcatatcaatgatgcgtactgtattggggagttccgcccgaaacaccggacgccggacgtctatattgaaaagaaacgccggaatgaccggatcctgcagaaattttatgatgcagtctatatcgaccggcgagatgggaaggaaaagtccgggaaggagctttttaatgggagaatcagccggaaccacaagaaggattccgagaatctgcatccttatcggcagaagaagatcaaaaaaggacatctttccatacggaaaagcaggacgcagctcaaacctggaagtgttgttctctataaaaacgagaggaagatcgtacacgggacacataccaggtattacaaaccgaaaagatcaccggtcccggtgaagcgtatcaatgtgcaatttaccgaaccagcctctgatgggcagaaaagtgcagaccttacgaattgcactgtgatcggacaggaattcatccgtggctggaagcaggttatagtataa

SEQ ID NO: 1792 - DNA, 338 bp, Eubacterium sp. An3
gtcaataaccccgcctgatttgccttcggcaaattcaggcgaggcttgcggtccgccgtgagcctgattgattagcctcagctgtcggctcattcgctgtcagctacgttaccccagaatccatcatcaggtaagacaggcaccagtggatgctcctcaagtccactgctctgcggtgtgggattaaacagtctctgagggaaggagaagtgtcccgcataaaaacctggggataacattggcgatgaggaccacccccgaaagggagaaccccatgtatgacggggcattcgctccgtcccatgggaacgcgtaagcgaaaggagggaaactctatg

SEQ ID NO: 1793 - DNA, 1590 bp, Unknown
  human gut metagenome genome assembly, contig: NODE_3304_length_8539_cov_2.986681, whole genome shotgun sequence WGS
atgcggagataccggttatctccgggatactgcatggcacattataaaaggaggcatctgatgcctgatacagattacatatatgtactcggcgttgacggtaaaccgcagatgccgacaaaacgaaagagacatgtcaaaagattacttaataccggcaaggcacgaattgcatgccatgtcccttatacaatacagttactttatgaaaacacacctgttctccagcctgtaatgctggctgaagacccgggacgcacaaatatcggcatggcgattttatccataaaaggtgaactactcatgtctgctgtcgtggaaacacgcaacagggaaatcgtaaggctcatgaatcaccgcaggggatatcgcagggcttcaagaattggtgaacgtaaggccagacagcgtcttgcaaaacgtttcggcacaatgcttaaggcaggtctgattatgcgtaaacttccaaagtttgcggctgacaagtttatcacatgccactgcatcaaaaatacggagtcgcgtttcttcaacagaaaacatccggatggatggcttacgccgacttcaaggcagcttgttgaaacacatatcaacttgatgcacaagatacagaaatacctgccggttacagacatcgccatggaagtaaaccgctttgcatttctgtcgctggaaaacccgtctgtttcgggagtagacttccagaatggaccgttaaaaggctttgacagcctgcatgatacagtaaatgaattacagcatggcaaatgcctgctgtgtgacaaaaagatagaacattatcatcatattgttccaagatccataaacggctcaaatactattggcaatatagccgggctgtgcatggaatgtcacgacaaggttcataaatgtgcagcatatcagaaaaagcttaacgatgtcaaaaagggactggataaaaagtatggtgcattgagtgccctgaatcaggcagtgccatttatctgtaaatgtcttgaagctgaatttggcagagagcatgtatcttactgtaccggccgggacactgcaaaaatgcgcagttcttttggattccaaaagacaaaggataatcagatgcatgaaactgacgcatggtgtataggaattctcgcattaaacaaaattccgaatgtggttccggattttggacagacatactgcatcagacagttcagacgtcaggacagaagccttgtttgcgcccagacagaaagagtctacaaactggacggtgtgacgattgccaaaaaccgtaaaaaacgtaccgaacagaaaacagattctctcgatgactggtacaacagacaggtgactttatacggcaaaaagaaagctgatttcatgcgcagccgattgactgtcattaagagcaaaagacgctataatgacttaacacgcgtcatgccgggagcagtattcatgtacaacggagagtgtcacgtcttaagcggacgtctcacagaaggacaatacttccgcgcagtgggtgacacaaaaacaaattatcctgcttcaaagtgtaagataatcagacacaatgaaggactggtgtttgtatgctaa

SEQ ID NO: 1794 - DNA, 801 bp, Unknown
  human gut metagenome genome assembly, contig: NODE_3304_length_8539_cov_2.986681, whole genome shotgun sequence WGS
ttgctcgaagaacataaggctaaagtggtgagaaaatgtccatttacaattcagcttaattatgaatgtgtaaacattattcaacctgttagtcttggtgtagacatcggatttgaaaatattggaatttctgcaacaactgaaaaagatgttctctttgaggctaaagtcaaaattagaacagatatagttaaacttctttctcaaagaatagagataagacgtacaagacgatcacgaaagacaagatatcgtaacactcggtttctaaaccgaaaatatacgaaacctaaaggatggaaagcaccttcattcagagctagactagattcacatgtagaacttattgcaaaagttcacagtattctgcctatcggcaagatcattgtggagattgcaagttttgacatacagaaaatcaagaatcctgagatcaaaggtgctgagtatcagcaaggtgaaatgcttggattcaacaatttaaaagcttatatcttatgcagagatgggcatctatgccgatgttgcaaaggtaagagtggtgataagattttaagagttcatcatcttgaatcaagattaactggtggcaatgctcctaacaatctcataactttgtgtgattcgtgtcacacgaaatatcacaacggtttgatagatttaaaagatattaaacgtggaaattgttataaaactgaatcatgtatgacatctatgaaaaatcaattgattagagatctacgatcaaagtattctgaagtatatgtaacgtttggtgacaaaaccaaatttacaatataa

SEQ ID NO: 1795 - DNA, 301 bp, Unknown
  human gut metagenome genome assembly, contig: NODE_3304_length_8539_cov_2.986681, whole genome shotgun sequence WGS
atcaggaaaaaataagtatctgtcataaaataacttgattatttcttgacttagtgcttagtcttagcaaagtttacttttcaaagtaaattgagctacgttatgaaagaatatatagttacgtcagaatgttctacctagttctgacctctaaggtttatgattaaacagttcacacgtttgaacagtgttgtagacaacaaaacctttcaataacattgacgaaggtagttttacagttttgcagtatctggcttatagcaataaactgtaacttttaaaaaggtttaaaatgaaattt

SEQ ID NO: 1796 - DNA, 231 bp, Ectothiorhodospira magna
atggcgattctggtactggacaagaggaaaaagcccctgatgccctgctcggagaagcgggcacggttgctgctggagcgggaccgggccacgggcctgccggtgatcaccagtagcggtggccgcaccaaatacaatcgacagcggctgggcattcccaagacccacgccctggatgcagcttgtgtcgggccagtcactgccaccacccctggaatgtgccctccttga

SEQ ID NO: 1797 - DNA, 289 bp, Ectothiorhodospira magna
gtcaactaccccgccctgaaggccggagcttgtgaaagcaagccgggttgaccagggtcagcggtgaaaacccgctacgtttgcaacaggtcgtcaagacccaccggcggatgctgcctcagtctgccgctctggaaggttaggatcatgctggcgaaaggtaaagcgccgaaggttccagccgccgcgtcagcgggagccggttgcagacattcccgaggggagatgaggcgcaagccctgcgtcactggacccgtaagggttctgttttaggagatttgaaatggcg

SEQ ID NO: 1798 - DNA, 1356 bp, Euryarchaeota archaeon
atgcagaagttattggtagagtttaagaacacatcaggggatgctcctcaagtcccctgctctgtaagtggggcattaaacagagaggaaactctcagtgtgccctgcatagtactggccaataacaactccgatgaggacctacactctggcaagagtagacaggacttgagagttcctgtgttaaatatgcgtggaaaacctttaatgcctatgagacctagaaaggcaagagttttcctgaaacaggaaaaggcagcagtagttcagcgaagtccttttatcatacagttaaaatacccttcaggtgaaacaaaacaagctctaaaattaggtatagatgctggatattcaacaataggcttcagtgctataaatgacaagagtgaattactctcaggtgagttaactttgcgaaaaagaatctctaaactccttgagcagaaaaaacattacaggcgagctcgaaggaataaattatggtacagaaagccaaaattcaataatcgtagcaaacccaaaggttggtttgcaccttctatacagcataaacttgagacacatctgagattgattgaaaaactgacgaaaatactgcctgtaacaaaaataacagtagaagtatcgagctttgaccagcagaagatgcagaatccagagattaatggagtagaataccatcaaggtgaattacagagctacgaagtaagagaatatctgctggagaaatggaagcataagtgtgcttattgtgggaagagtaatacacccttagagattgagcatattatacctaaaattcgaggtggaacagatagagtttcaaatctgactttagcgtgccataaatgtaatcagaagaaaggagataaaacagcagcagaggttggatatcctgaaatacagaaaaaagcaaatcaaacattaaaaacaactgcatttatgaatatcgttagatggagactggtgaatactctgaagtgtgactggacgtatgggtatattacaaagcatgctcgaattaaattagatatggagaaaagtcatataaatgatgcttttgtgattgctggtggaacaactcaaagtaggagtaaaccttataaagtgacacaaacaagacgcaataatagaagtattcaaacaaacagaaaaggttttaaaccttctataagaaaacaaagatataaattacagcccaatgatttagtaaaatatattaaatctctatgtaaagtgaagggtgtccataattatggggaatatgtaatagtagaagggaaaatagggaaaatctttgatattaatgttaagaaagtggagttattaaaatatggaaaaggaatacaattctaa

SEQ ID NO: 1799 - DNA, 253 bp, Euryarchaeota archaeon
gtcaatcaccacccattaaaatgagtggcctgtctcgtgagagacaggggtaacaggttgattaggaggcattgaagaatgcagaagttattggtagagtttaagaacacatcaggggatgctcctcaagtcccctgctctgtaagtggggcattaaacagagaggaaactctcagtgtgccctgcatagtactggccaataacaactccgatgaggacctacactctggcaagagtagacaggacttgagag

SEQ ID NO: 1800 - DNA, 1191 bp, Unknown
  Ga0074646_100108 JGI
atgaatccaaaagtatttgttttggcagaagatgggacaccattgatgcctacaactgcatcaagggctagacgaaaattgagggatggtcaagctaaagttgtgaaaagagaacctttcacaattcaattgctttacaaatcaggaatggagattcaaccaattaagttggggattgattcgggctatcaaaatataggtttttccgcaacaacagaaaaagatgaattaatatccggtgaagttaagttggataatggaatgtcaaagagaatccaagacaaagccatatatcgtaggaatcgcaggaatagacttagatacagacaatcaagatttgataatagaacacaaaaagaaaattggttgccaccatcaattcaaagaagatttgatactaatattagtcttattaacaaattgagatcaatacttcctatttctgagattattgttgaggcaggtagttttgatattcaaaagttacaaaatcctgaaattgaaagtaaacaatatcaacaaggtgaaatgtatggttatgcaaatctaaaatcttatcttttgacaagagaaaaaagtttatgtcaattgtgtggtaaagttcacaaaaagtggcagatgcatcatattattccaaggtctaaaggtggaacaaatagaccaaagaattttgcattgttgggcgataaatgtcatgataaattgcataaacaaaatttatatcacaaattaaaaaagaatagacaatttaaaggatctactttcatgtctatcattagaaagagattctatgatttcggatataacgtagtttatggttatcagacctttgtggatcgcaataaattgagtttatctaagagtcatgcaaatgatgcctttgtaatatcaggtggtataaatcaaaatagagtaaatatgttcatagtaactcaaaaaagaaaaaataatagatgtctgcaaattaatagaaagtcgggaattttgattcgtagaaagagatatagtattcgaccaaaagatttagttaaatattcaggtaagatgtttgaagtgatagggattattagtaggggattaagtgttggtctgacggatggaattaaaaagatttataaatcaccatcaaaattggatgattggatctttcatagaaagacattgatttggagaaactgtataggtcaataa

SEQ ID NO: 1801 - DNA, 249 bp, Unknown
  Ga0074646_100108 JGI
gtcagttgtcaaggtcttaataccttggtttgttaggtgactaacaacgattaaaagagctgattagtctaagtcttaattgactacgttatcttagaatatataggtacttcagaatgcctcccaagttctgaacactacggatgatagttaaacagagttcaaagactcggtgctattattaaaaacctaagaataacattgacgatgggaatcaactccgaaaggagatttataatgaatccaaaa

SEQ ID NO: 1802 - DNA, 1251 bp, Unknown
  Ga0318466_10004665 JGI
atgattttagtttatgttttgaataaagatagtaaacctttaatgccttgcaaagcttcaaaagcaagaaaattattaaaatcaaataaagcgaaagtcataaatagaactccttttactattcaattattatatggaagttcaggttataaacaacctatgatattaggagtggatacaggaagtaaaaatataggtttatctgtaacaacaaataaacaagaattattttcggctgaagttttattaagagatgatatcgtagaaaaattatcgacaagacgagaaataagacaaaatagaagaaatagaaaaacaaggtatagacagccaagatttaacaatagaattaaatcaaagaaaaaaggttggttgccaccttcttcattgcagaagataaatagtcatattcaaataataaataaagtatataaaattttacctgttacagatttaataatagaagtggcaagttttgacattcaaaaaatcaaaaatcctaatattcagggaatagaataccaacaaggagaacaattgggattttggaatacaagagaatatgttttatttagagataaccatacttgtcaatgctgtaaagggaaatcaaaagataaagttttaaatgttcatcatatagagagtcgcaaagttggtggagatgcaccaaataatttaattactctttgtgaaacttgtcataacaaatatcataaaggagaattaaatattattttaaaaagaagttcttcatctttacgagatgtggctttaatgaattcgataaaatacatattatataataaactaaaaaaaatttatccaaattgtaaaattacttatgggtatataacaaaatataaaagaataaataataatttatctaaaactcatgcagttgatgctttttgtataacaaataatctgttagcaaatagattaaattatttttatcaatataaatgtatgagaaatcataatagacaaattcataaaatgaaaatttataaaggaaatgttagaaaaccaaatagtttaggtaaatatgtacaaggatttcaagcttttgataaagtaaaaattcttaattctaacataataggatttataaaagcaagaagaaaaacaggtagttttgtaatatctgatatttatggaaatatcatacaaaatataacttataaaaaattaaaattgttagaaagtagacgaagttatttagtagaattactaataaaaggagaataa

SEQ ID NO: 1803 - DNA, 321 bp, Unknown
  Ga0318466_10004665 JGI
gaaagttaagattattgtcacccatacatattgtggataacgagaccaaaatttcaatttaacataattgttgattgaagtttagcctcagtaaagaattttcttttactacgttactttagaatatatagttacctacaaatgttaagtccagtttgtagctctaaggttagtgattaaacatgtttttttagacaagtgttgctaatatataaaacctaaagataacattggcgagggctacctaacttactttaagtaaggattactttgttttagtaatcaaattatttttaggaaaggagtttatctatgatttta

SEQ ID NO: 1804 - DNA, 1308 bp, Unknown
  Ga0182240_101142 JGI
atggtatacgtactgaattgtgaaggcaacccgcttatgccaaccaaacgtttcggcaaggtacgccgtatgttaaaagataaccgtgccagggtggtaagagctaaacctttcaccatccagttaacttacgagaccaccaactacgtacaaccggtgactcttggcatagacgccggctacgaaacagtaggcttttcggcagtcaccgaaaaagaagagctgattgccggtgagtgccagcttctgaccggccaagcagaacgtaacaaagagcgcgcaatgtaccgccgcgaacgccgcaatagattaagataccgcaagccccggtttgacaaccgcaagaagcccgcaggctggctttcgcctagcattcaacacaagctggacagccatatccggctggtgaacctggtcaaatccatactgtcggtgaccagggtagttgttgaagttgccagtttcgacatccaggccatcaagaacccgggtatccagggcaaagagtaccagcagggcgagcagtacggtttctggaacctgcgggaatatatcctgcaccgggacaaccaccagtgccagaatccagactgcagatccaaaaccccggaacttgaggtacatcatatcggttactggaaaggtgataggacagaccggccgggcaacctgattaccctttgcattaaatgccaccgcccggaaaaccacaaaaaaggcgggctactgtggggctgggaacccaaagtcaactcttttaaggcagaaactttcatgactactgtacgttggaaaatggtcaacatcctgggcagcgattatacttacggttacattaccaagaaaaaacgcatggaattaaacctgtccaagagccatattaacgatgcatttgttatcgccggtggtactgctcaaacccggtacaaaccgctgactataatccaagtgcgccgcaacaaccgtagcttgcagaaattttacgatgcaaaatacattgacatccgcactggcaagaaagcaaccggccaggacttgaactgtggcaagcgtaccagaaaccgtaaccttaacggtccgaacctgcgcatttatcgtggccaaaaattatccaaaggcagggtacaggtacgtagaaaacggcatccgttccagcctggtgatacagtaatatttcagggcaagaagtacactgtcaaaggcacccagaaccgcggagattacgtgcggctggcggagctacccaagccggtcaaggctggtttactcaatcatctgtattatggcaaaggacttcgggtagtttag

SEQ ID NO: 1805 - DNA, 311 bp, Unknown
  Ga0182240_101142 JGI
gtcaactatccccacttaacggctaacgccgtttgaagtgggggcttgcagaagtatagcaaagatatttgccatacctgcaagcccggttgattagcctcagccaccagcgaaaagctgacagggctacgttacccgtgaatatataggcacttccgggtactccacacgctccgaaccctgcggccagcggttaaccatcgctgacgggtaggcgaagtgctgctggcgtaaaaccacgggataacattggcgaagtggaccaacagccacaaaggctgatttatctctgcaaaggagattcaaaaatg

SEQ ID NO: 1806 - DNA, 1200 bp, Unknown
  Ga0310695_10004545 JGI
atgcctacagaagaccatcgtaaagtaaggttgcttctaaaatcaggtcaggcaaaggttgtccagagaacaccatttacaattcagttacttcacactactcacgtttataaacaagatattaatttaggcgtggatactggtagtaaagtaattggtttatcagcaactacttctaagaaagagttgtttgctgaggaagttactattagaaatgatattacagaattgttatctcttagaaaaatgtatcgtaaaaatagacgatggagaactactagatatagaaaagaacggtttttaaatagagttaaagtgatgaaaaaaggttgggtagcgccatctattagagctaaacttgaatatcatttaaatataattaagaaagtatacaagatattaccaataactaaattaatagtagaagttgcttcatttgatatgcaaaaaatacaaaattccgaaattgaaggtatagaatatcagcaaggttcacagtttggcttttggaatgtgagagagtatgtattgcatagagataatcacgaatgtcaatattgtcatggtaaaagtaaagacaaggtgttaaatgtacatcatattgtaacaagaaaaactggagggaattctccaagcaatttaattactttatgtagaacttgtcatcaaaagtatcatagcggagaaattaaattaaaggtaactaaaccaaaatctttaaaagatgcagcatttatgaatataatgagatggaagttatataatagtcttaaagaaatatataataatgtgtatatgacatttggatatattacaaaaaacattcgtattgaaaatagtcttcctaaagaacattatatagatgctagatgtatttctggaaatccaaaatctctttcattaggattattttatatgggcaagctagttcgtagacataataggcaacttcataaagcaacaatcgggaaaaaaggatatcgtaagagtaatcaatcgccaaaatatgtttttgggtaccaattgtatgataaagtatattgtaaaggtcaagtatgttttatattttctagaagaacaaagggatactttgatataagacatattgatgggactagagtaactgcaagtataacatataaaaaaatgaagctattggaaaaaagaaaaacgttgttacttgagattgttaaagtttaa

SEQ ID NO: 1807 - DNA, 294 bp, Unknown
  Ga0310695_10004545 JGI
ggaaccatcaataacctataaactttagtttaagaagaaattctttattgattaccctaagtctggtttaccaggaaactacgttatcgaagaatgtataggcacctacggatgttcgtcctagtctgtagctctgcggctaatgattaaacagtcctgagaggtaggggcagtgttgttagcatataaaccttctaataacattgggtaagggcaactaacgtttacttttgtaaacgagttacttcatctggtagtgactacttttaagtaagaaggaggtaatcttacttg

SEQ ID NO: 1808 - DNA, 480 bp, Unknown
  Ga0310138_000236 JGI
atggtatatgttatttcaaaggatggtaaaccattaatgccaacaaaaaggcatggtaaagttagaagacttttaaaacaaggtcttgctaaagttgttagaagagaaccatttacaattcaactattgtatgatactacaacatatacacaacctgttgtagttggcgtagataatcgttcactgcataaagcaaatccaattaaaggtggaaaaagaccagtaaatactgtaaaggaagttagagggtttagaagattcgacaaagtaagatataaaaatcaaattggtataatctacgggttaagaatctctggatactttgatatgcgttcattaagtggagaaaaaattcactcatcagttaagtggtcaaacctaaaacttttagaaaaagcaaaaacactaatattagaaaggagggaacagcgcattcctctccatcttaaagaagatggagtctcctgcgctggcttatga

SEQ ID NO: 1809 - DNA, 255 bp, Unknown; identical to SEQ ID NO: 909
  Ga0310138_000236 JGI

SEQ ID NO: 1810 - DNA, 1179 bp, Unknown
  TB_LI09_3DRAFT_1004762 JGI
atggtttatgttttatcaaacgatggaaaacctttaatgcctacttcaaggcatagaaaagtcagattgtggttaaaagagggaaaagccagagtcataagacgctttccgtttactatccaactattgtttgacccttgttgccaaaaaacacaaaatttaacgttaggcttagacgtcggatttaaaaccgtaggcgtcagcgttgtttctgacagggtggaagcgtttagcggtcaaattcaactccgaaacgacgtatctgccaacatgacagaacgccgtatgtatagacgtaatcgccgtaacaggttatggcacagaaaaccaagatttcttaaccgtaacaaaaagcgggttttagcgcctggcgtaaaacaaaaaatcgattctcatttacatttaattgccttattaaaattcatattgcccattacaaaagtcatcgttgaaacctgctcgtttgatccccataagctaaaaaatcctcatgttcaaggaaaggattatcagcaaggagaacaatatggctatgaaaatgtcaaagcttatgtgttagccagagacgggtatcaatgtcaggcaaatcaaaaagggcatagtcctatcctgaacgttcatcatattcaatcgagaggacaagggggaagcgataatccggataatttaataaccctttgtaaaaagcatcatgaacaattgcacgatggtaaaatcaggctacatgttaaagagggtaaaatcttaaaagccgcgacagcgatgaatatcgttagaagccaattgttaaaaaaaatgcctgaagcgattgaaacgtttggttatcttaccaaagcaaaacgtcaggaacaaaagcttcagaagagtcatgcaactgacgcgtttatcattgccggcggtaatggacaaccgagactcaacctgttggaattgttgttgaagcgtaaaaataatcgatcattgcaaaagaacagaaaaggttttagtccctctattcgagttcaacgatatgcaatacagccttatgatttagtattatttcaaggcaagcgatatagagcgataggaattcagaacaaaggggcttacttaaagatgacaaacggtattcatacattagtgaaaaatgtaaaacaaatagaagttatctatcatcaaaagactttggtttgtgtgtga

SEQ ID NO: 1811 - DNA, 308 bp, Unknown
  TB_LI09_3DRAFT_1004762 JGI
gtcaatcacccctaagctaaagacttaggggcttgtaaggcgacttacaggatagctcaaaaaaagagtaatggttgattagggggccgaaaggcagaagttacggagtgagatacatgcacacccaagaatgctcctcaagtttttggctctgtgatttgtctttaaacagagaggaaactctcagtgaggcagatttaaaaacctccggtaacaaccccgaagaggatctacgagtttgacagttctcggcttacagcgctaaaaactgtcgtttcttcttaaaaataaggattttgatcataatg

SEQ ID NO: 1812 - DNA, 1560 bp, Unknown
  Ga0180007_10021296 JGI
atgacagattctcagaaacttgagtattttaaaatgaataatgtagaaaaggtaaattatcttaaatctcaaaatgttgtcaaacatcaagaacaagaaagtcaaaaggatataaatcagaaagaaatatctgtcaaaataatcaaacaaggacaggtgtgtgtccatgtattgaacatgagaggtaaacctttgatgccaacgtctccaagaaaagcaagacttctattaaagaataaaaaagcaaaagtggttcagagaagtccatttaccattcagttgaaatatccaactggagaaaacaaacaaccaatcaaattagggttagatacaggttataaattcgtcggattttcggcggtgacaaataaaagggaattgatatcaggagaagtgattattaggactgatattcctgaaaagatgactgaaaagaagatgtatagaaggggaagacggaatagaaatactagatatagagaacctagatttgaaaatagaggtatcccagaaggatggcttcctccatcaacacaacataagttagatacctatgttagattagtcagtaagtttgacaaaatattacctataacgcatatcaatgtcgaaatagctccattcgatactcaaaagatgcagaatccagagatatctgggattgaatatcaacatggagagttgcaaggatatgaggtaaaggaatatctacttgaaaaatggggaaggaaatgtgcatattgtaaagcagagaatgtatcttttgagactgaacatataattccaacatcaagaggtggaacaaatagagtctcaaatctgacgatagcatgtcatgaatgtaatcaaaagaaaggtaatatgacagcagcagaatttggccatccagagattcaaatcctagcaagacaatcattgaaagctgcgacatttatgaatgttgtgagggcaagattagttgataatataaagaaatcgtttccagatctatatgttgataatacatatggatatattacaaaatatacgagaataaaattagatttagataaatctcatgctaatgatgcatttgcgatagcacattccaatagtaggatgagttttggtcagataagatcaaaaccttatcaggtcaaacaaattagaagaaacaataggtctctacagctaaatagaaaaggattcaaaccgtcgataagaaagaagagatataaatattctcctggagatttgataaagagaagatctgatatccaaacaactggatggggcgagaaaagagataaaaaagatagatcgatgatgtacactgtcaaaggaattttcaattatggtaaatggattagattggctaatcctatttcaggcgaaaaagatatttatattcctattgaagatgtgaaactattgaaatatggaagcgggttattatttcaattagcaaaatcaaatgaacataaaatagagaagaaggagaaggttatgaaattgaataagaaagaacagaggattatagatatgaaggagcagaaatcaatagatgatacatggagttaa

SEQ ID NO: 1813 - DNA, 292 bp, Unknown
  Ga0180007_10021296 JGI
gtcaactaccccgccctgaagggcggggcctgtcagtgatgacaagagcaatagttgattaggaggtatacctcaaaaatatgcagacgttagaagttagaaatacatacacctcgcccgatgctccactagtcgggggaatacgtgatcctgtattaaataaagattcaagaaggcagccaaagctgtcttcaggtcttagtgtgcaggatttaaaaacttcttctaactctccgaagtggacctactcagcaatgagaagacaggactcgagagtctctgtaggtgatta

SEQ ID NO: 1814 - DNA, 1269 bp, Unknown
  Ga0310133_003358 JGI
atgtcgtgcaaaccttcaaaagcaaggaaactgcttaagcaaggcaaagcaaagatagtcaaatatgaaccattcacaatccaactgttatacggcagtagtggttataaacaatgttgtactgctggtattgacgctggcagtaaaaacataggcatagcagtaacaacagatgatggcagaataatttataaagcacaagtaatattaagacaagacatcaaagaaaatattgaaacaaaacgtagacttagaagaagcagaagaaacagaaaaacacgttacagaaaaccaagatttcttaaccgcaaaaggaaaaatggttggcttccaccatccataacagcaagaattgatgcacattacaatattataaaaaagttatctaaaattatacctattacaaacatcattgtagaagtaggacaatttgatacacaggcattaataaatccaaatatacaaggtaaagaatatcaaaatggagatatgaaaggttttgacagtgttaaggaatacgtaaaaataagagacaattatcaatgtcattatgctaaattaagacctgatataccatgttcaggcaaaatgacagtagatcatataatacctaaaagtaaaggcggaacagataatccaactaatcttgtatgttgctgcgaagaacacaacagacagaaagacaatctattgtacaaagaatttactggcaaaaatccgccagcaattaggaattttaaggctactgcatttatgaatgtcttaagggattatcttgttcctaaattacaggaaatagcaccaacagaatatacttttggactatatacccgcagaaaacgcaaagaatggaatttagaaaaatcacacataaatgatgctattgctattgtggggataaaaccaagacaggaggtatcagtcagttattatatcaagcaagttcgtaaaaagaaacgcagtttacatgaagaaattccacgtaaaggaagaagtaaacctaatagagatgctaaaagaaacgaaaagaacataaagaaaatcataactaataataactgctggtgtttgtgggataaagtatatataccttcaatagataaaataggctatatatcaggttttacaggaaaatgggtatatgtacaggacatagaaggtaattatttacgaatatcagaaaaatataaacaaatcaatccgaaagaattgcagctaatttgtagaaataacaattatattagtcagcaattcatctccaccttatag

SEQ ID NO: 1815 - DNA, 246 bp, Unknown
  Ga0310133_003358 JGI
gtcaactacccccgcttatagaagcggaggcttgaaaaagccttggttgactagcctcagccaccagcagtatgctgacagggctacgttagacaggttatgacaccttgaaatgatgctcaagtttcaagctctgtcgtacatgacctaaacagttctgtgggtaggaacagtggcttgtacgtgtaagcttgtctaacattggcgatgggcaaataactctgaaaggaggaacactttatgtta

SEQ ID NO: 1816 - DNA, 1548 bp, Unknown
  human gut metagenome genome assembly, contig: NODE_78_length_104184_cov_6.349394, whole genome shotgun sequence WGS
atgcaatatttagattttactttagtagtagataaaaataataaaccatgtgtaccgattttaaacggtagagctggttatttgcttagaaataataaagcaaaaattattaatcatgatccattagtaataaaacgaatagacgattataagagtgattttgaaaatagggatattttcgagttaaaaattgatagcggatatttgaatataggattttctgtcagtgataattatcatgagtatttagctggacaagtcgaattattaaaaggaatgtcggatagattaacaaatcgaaatggatatcgaagaacacgaagatccagaattaggtacaggaaaaataaaaatgttgattacaaaaccgtacataatccaacatataaaaatggaaatgaagaaggatggtttgctccatcaatacaacataaaattgattcacatattcgtttaatagataaaattgcgtcatgggttccagtagataaggtaattgtagaagttgctaaatttgatatccagatgataaaagctttagctgacgggaaagaaatatcaggaaaagattatcaaaatggagaaatgaaaggatatgaaaatgcagcagcttatgttagagatagagataaacatacatgtcggttgtgtggcgcaaataaaaatgttgtgattgaagttcatcatatacaaccgcgttcaaagggaggaaccgataaaccaagtaatctaatatctttatgtcatagttgtcatcggaaggtgcattccaataataacgacaataaatattttgagaaagttaagagtatgaagttatcggatacatacaaagacagtacttatatgaatatggttcgttgggaactttttgaaaggctttctggcaaatatgacgtcaaagttgggtatggatatcaaacaaaaattaatagaaggaatgccggtttaagaaaatttcattatacggatgctgtttgtattaatgattacaaggatgtgacactaacggagaatatctatattgtagatcaaaaacgatgcaatgacaggagtatggagacatttagtgatgcaaaatacatagatgtacgtgatggaaaagaaaaaagtggaaatacattatataaggaaaggcttccaaatgctccgtctaaacgagtcacgcaaaaagaatatataaacaatatgagacaatttcgtggtaagaaaattaaacctggtaaacgcacttttgtttgtaattcatattgtttgaaatgtggagatttaatttacataaatagtggaaagcatagaggaaatatcgcagaagtagaatccatgcaaaaactacctaatggtaatttcaaaatacgatttacatataaagcacaaacagtcaaatacccttctataagtataaagccagaagaatatgaattattaaagaataatttattagacaaagtaaaaattgtaagaacaaggcgtggaatgatttggagaaaatataatcgtctagaatacgaagcgacccatgcagatcaagaaggaatggctgtataa

SEQ ID NO: 1817 - DNA, 267 bp, Unknown
  human gut metagenome genome assembly, contig: NODE_78_length_104184_cov_6.349394, whole genome shotgun sequence WGS
gcaaatcctcaaaataaaataactctataaaattaagacgttaaataaaaatagacttagatttaatctacgttattacaagaaaatatattgatatgtaactctagtatcaaattatatcgtttagatttaaacatgcgttacgtctaactttcttgtcgcaagtgatttaagcataaaaacttgtaataacattgtcaaagagtattaccgactataagtcgagttattaattaaaaggagaaaattatgcaatatttagatttt

SEQ ID NO: 1818 - DNA, 1557 bp, Unknown
  Ga0082212_10029072 JGI
ttgagtaaaagtaaagagacctaccctgaggatgcttccccagtcccaggctctagaaggaagagtagcagacaagctagtggtaagcacgaaacggattcttccaacaagcgcaagcgagcagctgatactcaacattggcgagaggagactggccgaaaggctagcgtcacagagttcctgactctgcccagtgagggtgacctcactgcccgcaagggcaaacaacccctccaaaactgcgtagcagtattggacaaaaaaggaaggccactacagccaacctcaccgcgccgagcacgcatcctgctcaaaaaaggaagagcacgagtccaccgcctctaccccttcaccatcagactagtggaccgcctccaagaagaatcaaccattgacggagtggaactcaaagttgacccaggcgcaaaaaccaccggcttagcaatcaccgtgaccaatagtcacggtgaaacaaaagccattcttctatcagaattagttcacaacggatggctcattaaaaagaatctgcagaaaagggctgctttgcggcgaggccgcagaagcagaaaactaagataccgggctccacgttggcataatcgagcacggcgtcctgtctgcggattagacgtctggctgccgccaagtattcggagtcgtcctcttgccatacttaatttgacaaagaagtgggccaaactctttcccattacttgcgtgtggattgaaaatgttaagtttgacatgcagagactacgtaatcctgcaatttctgggaaagagtatcagcagggcactcttgctggttacgagttgaaagagtacttactggaaaagtttaatcgtaagtgtgcctattgtgacaagagtggaataccgctaaatgtagatcatgtggtaccacgggctcgtgggggtactgatgctgttagcaatcttgttttggcttgtgttaagtgcaatcagaagaagagcgctaagagtttagatgaatttttggcggaagataaaacaagattggctaagattaagcggcagttgaaagtaccgctgcgcgatgctgcagcggtaaatgtggctcgcaaggttttacctatcgcattggttgaggctggttttattgtaaagcttggtagtggtgctcaaactaagttgaatcgtaagcagtttggtattcctaagtcgcatgccttggacgctttgtgtgttggcgctgacattaaagtgagtgacgagtatcctagttcaatgttggtcattacttgtcaaggtcgaggtggtcgtcagcggcagttagtagataagtttggttttcctcgtggaaaaccaaagcctaggtcgaagcaggtttttggttttgctactggtgacttggttcgagcggtagttcctaagggtaaaaaacagggtgagtatttcggcagggttgcggtgcgtagcggtggtaattttaatataaagactttgaacggtactgttcagggtattaagtattctcattgtcagctcgtgcaacgagctgatgggtatggttatcagtttagtaaaatataa

SEQ ID NO: 1819 - DNA, 211 bp, Unknown
  Ga0082212_10029072 JGI
gtcaactaccaccacctaaaggaggtggcctgcagtgaatcagcttctgattcaccaaaagccaccgctaagtaagtgagattgcgaaagcaatcacggttgaccagcctaagacacccctgaaggaggtgactacgttgagtaaaagtaaagagacctaccctgaggatgcttccccagtcccaggctctagaaggaagagtagcagaca

SEQ ID NO: 1820 - DNA, 1290 bp, Unknown
  Ga0247608_10014894 JGI
atgaaagtttatgtattagattggaaaggaaaaccaattatgcctacctctagaggaggtagagttaggtggcttttaaaaacaggaaaagccaaagtcgtgagaactattccctttactattcaattattggaagagggaaggaaatactatactcaagaaattaatctaggtataaaacccggatctaaagaattggggatatctgctacttcagaaaaagaggagctgttctgtgcatctgtaaaattgagaacagatatagtaaatctcctatctactagaagagaaactaggagaactagacgaagtagacttagatatagagagtctaggttcttaaatagagttaaaaccaaaaaacctggttggatagctccctctattcagaataaaattcaatttcatgtcaagatagtagaatttgtcaataagattttacctatatctaatatgatacttgagatagctatctttgatattcagaagataaaaaatcctagtattaatggagtacagtatcagaatggaccacagaaaggtttctggaatgtacgtgaatatgtcttatttcgagataatcatgtctgtcaatattgtcttggaaaatctggagatgaaatcctcaatgtacatcatattgtatcaagaaaaattggtggtaattctccaggaaacctgattactttatgtaagacttgtcataaagactatcatgaaggtaagattaagttatccattaaaaagagtaggtcttataaagatttaacatgtcttaatataataagagatagattatataaagagttattcaagagatatggatttatatatattacttatggttaccaaactaaatgtgatcgtatatctaagggtttattgaaaagtactgatacagatgcttatgttattagttcaggtgatactaatcctttattgagtgataccagatattgtattaatcaggttcgacgacataatagacaaatacataagtttaaaattcttaagggtggaaagctcaaaaagaatcaagctaggtataaagtatttggatatcgtcttaatgatatagttaagtatcaagggaatcgatattatataggtggtcgccgtgagagaggatctttcaatattaaatcattagagggagataagaaattagatatattatataagaaattaaaattcttatatgaacctagacgaatatttatgtataatcaaagaaggaatgttactccaattcctcccacggctaaagcagtgggtacccttggagtgtaa

SEQ ID NO: 1821 - DNA, 387 bp, Unknown
  Ga0247608_10014894 JGI
aaaatatcagtaacccacgactgaacgatattataagaaaatatctggtcgagggcatgtaaatgccactatgctgattagtctaagtgaagtctctatgtattatagaattaatagaaagagatgaactacgttatgtgtgaatgtaatctcgagatctcgtatttctcggattatacaataggtacctacggatattcttccaagtctgtagctctacggttattgattaaacagctctgttgggtaggagcagtgttgatgacaacaaaaccatacaataacattgacgatgggagtactacctttaaagttattgatcataataatatgattagtaatgataaagtgtcttattgttaaacaatttttaaattaaaaatgaaa

SEQ ID NO: 1822 - DNA, 1284 bp, Unknown
  Ga0373631_0015577 JGI
atgcataatagaatatttgttctgtctgcaataggagagaccttaatgccttgccatccagcaagagcaagggctctcctgagagacagtaaagcaaaagttgtgaaggtttatccttttacaattaagcttacagagagaaccacaggtgaattgcaacctgttcaattgaaaattgacccaggttcaagacacagtggtttagctcttgtgttaactggggaacagcacctgaaggttatcttcggtgcagttctacatcataagggtcatttgattaagcaatctcttgatggtcgtcgtagcctgcgtcgtggacgtaggcagcgtaagacaagatacagaccagctcgctgggctaataggaaaagggctgatgggtggttaccaccttcagctatgagtagagttaataatctgaaggtttggacacagaaattcagtaggttaacaacggtgagttcaatttcgtttgagaagacgaaatttgatactcaccttatggttaaccctgaagtgtctggtgtccagtatcaacagggaacattagaaggttataccgtaagggaatatcttctggagaaacacaatagaacttgtgtctattgtggggctaaaaatgtcccacttcagatagagcatatccatccacgttctcgtggtggttcaaatgctatatctaatcttactctatcttgtggtccatgcaatcagaggaaggggactcagaccttggaggagttccttcctcgtaagcctgagcttgttcgtaagataaaggctcagacaagaaagagctttgcggatgctgcacaagtgcaagcaatccgcaataagtctcttgaagttctatgtgactttggtttacctgttgaagtatcaacaggagcagaaacaaagtttaacagaactagactaggttatggtaaagaacattggattgatgcagcctgtataggctcatcaggacaacttgtttcaatccacagacctgatagcaattatgttttagacataaaggctatgggtcgtggatgtagaaatgttcttgcatgtgataaatatggctttccttcaaagaagaaacctaagactcggaaacgagtccttggttttgaaactggagattacattaagactgctattaagggtaaagccttcaaggtcagaatgagcttgaaggtttctaatagtagagcagattttgatggaacaggcaaagccttaaaagactgtaggctaattcagaagaatgatggatacagttacaatcacttacattaa

SEQ ID NO: 1823 - DNA, 229 bp, Unknown
  Ga0373631_0015577 JGI
atgaactacgatttataagaatcttctagcaacttgttgctattggaaatagttaccgtggggtgcttctccagccccacgctctaaggttaggtgttaaacatttgtgaaacactgcacgaagtgcatctaacgacaaaccttataaatcattgtcgaggagacgttccgtaaggaacaataccgacataggattttcctattgttgagaaattcaaaaggtaacttt

SEQ ID NO: 1824 - DNA, 1293 bp, Unknown
  Ga0194138_10000007 JGI
atgccctgtcatccggctagagctagagaacttctaggtaaaggtaaagcagcggtatttcgacgcttcccttttaccattatcttaaaagacccggtgggctccatccctcaacctacggcaatcaagatcgatccgggcagcaagaccaccgggatcgcagtcactgtcaaaggtaaacgcggcgaacgttgtatcatgggtgtccatctggagcaccgcggtatcacaatcaagaagaatctggtcagtcgtgctacctgccgacgtaaccgtcgtaatcgtaagacgcgttaccgtaaaccccgattcctcaaccgaactcgacccgccggatggctcccacccagtctaatgcaccgggtgctgacgactctgacctgggtgaaacgactctgtctagcgagtcctgtctccaagatcgagatcgaacatgtgtcctttgacacccagaagatgctcaacgggtcgatcaaaggcaaagggtatcagcaaggtacactgcaaggctacaagatccgtgagtacctactctatcggtacaactacatctgtcagtattgttcgggtatctccaaggataaacgtctggagactgaacatgtcactcccaaggctcaaggtggatcgaactcgatcaccaacctgaccctgtcctgccatacctgtaaccgcgacaagggcaatcgcactcctgtccagtgggaatggtccctcaagggcaaaggggatgtgctcagtgcagcgagacgcaaaggctgtcgccgagttgcccaaggtaagaaaccacctctcagagatgcagcagccgtcaacagcacagctaaacggttgatccaagaagtccgtgaaatcggactgctctcggtagaacgtccaagctacatgacgaaatacaaccgtcatcgtcaagggtatccaaaggatcactttatcgatgcagcggtactgggtggtgcctgtgacattgtatacattccgaaggggatgagaccgttgactgcaaaagcattgggacatggttcgagacagatgtgtcgggtagatcagtatggtttccctagaaccttagctaaaggtccttctatggtctgcggataccggaccggcgatatagtcgaagccaaagtacccagaggtaaatatatcggtgcgtatgtaggacgtgtagctgtaagaagtagtggccaatttgtcattacaactgacgttggtaaaatcaccacccgtcaacgtcacgtcagtcggttacagcacaatgacggttaccgctacgcgcatcaacccacataa

SEQ ID NO: 1825 - DNA, 286 bp, Unknown
  Ga0194138_10000007 JGI
gtcaaccgccccatccttttaaccgaagataatctgctggtatagaggtttagttgaccagacccaggtttgtaatagaacctacgttacccaagaatacataggtactccgggatggccgagccagtcccggactctacgccgagctgttaaacaagcctgtgaggcagggttagtgcagtcaggatacaaaaccttgggataacatcgtcgaggctcacgttacaccgacttagatcggatagactaaggggaaaccctaatgaaggtaacacctactaactat

SEQ ID NO: 1826 - DNA, 1050 bp, Unknown
  Ga0102947_1000378 JGI
atgataccagtaatagataaacaccaattacctttaatgcctacaacagaaaaaagggcaagaaagttaattgagacaagtaaagcaactcccttttggaaaaagggaatattttgtattagattaaattttgagccttctagcagaaacaaacagcaaattgttgttggaattgactcaggctcaaaaagagaagcttatacgataagaagtaaaaaacatacgttattaaacattcaaacagaaacgcctgtttgggtaaaaaagaaagttgaaacaaggcgaaatgccagaaaagcaagacggttccgaaaaacaccatgtagaaaacctaggttcaataacaaatcaaaacctaaattacctccaagcacaaaatcaagatggcaattaaaattaagaattttagattttctttccaaggcttatccaataactgatgttgtttttgaagacatcaaagcaacaacaaaaaagggaaagaaaagttggaatttaaatttctctccattgcaagttggaaaaaaatggttttgtgaacaagtaaaacaaaattataaattaactattaaagaaggttgggaaacagctgtagctagaaaagaactaggtttagaaaaaattaaagaaaagttgtccgatcgatttgaggcacattgtgttgacagctttacattgtcaagttttctatttttagataaaaagcaaccagaaaacaaaagtattttatatctaaaaccaattcaatttaacagaagacaacttcatgtttttaatttttcaaaaggaggaaaaagaaaactttacggaggaacaatgtcgcttagattcaagcgtggaagtattgtaaaacatcccaaatacaacatttgttatgttgggggaagttcaaaaggaagaataagtctacataatttagaaactggcaaaagactttgtcaaaattctaaaattgaagatttgaaatttttgagctataatagtttccagataaggaggaagccattcctcccacaggacgagcctgtgggtatcctggcttgagattaa

SEQ ID NO: 1827 - DNA, 248 bp, Unknown
  Ga0102947_1000378 JGI
gtcaactacccccatgacaagcatgggggcttaaaaggagtacaaaagccaattggaaacaattaagactaaacagttgactagactacggaatgtacgtttgtacaagtccaaactgaatcaacttctggtggcacagaaaaaaatgtctcggatgcttcccaagtccggacctctttgttgatcagtgtcgaagggaaatatacacaaggcctttacgggcattttttataagaaacatgatacca

SEQ ID NO: 1828 - DNA, 1263 bp, Unknown
  Ga0210402_10005866 JGI
atgccgtgcaatgaacgtcgagcacggctgttgttagaacgcggtcgggcacgagtacatttgcggtatccatttacgatacggttagtggatcgtgccgtggctgactccgcactacaaccgattaccgcgaagctcgacccaggttcgaaaaagaccgggttggctttagtgcggccatcatctgctactcaatcggtaaacgttttaaatctaatagaaatagagcatcgtggttcgcaaatttccgacaaccttacgaaacgccgtggccaccgtaaacatcggcgtagtaaactcaattatcgtgccccccgttttaacaaccgaacccgctcgaaaggatggctagcaccttcactacaacatcgggtagatggcatcattaatttgctagccaaattacgtaaactggcccctattacggatttagctcaagaactcgtgcgtttcgatacgcaattaatgcaaaactctgatattaaaggtatcgaatatcaacaaggcacgttacagggttacgaaatacgagagtatgtgctagaaaaatggggacggcagtgtgtgtactgtaataagcgcgagcgcatactaaatttggatcatatcgtgcctaagtcccgaggcggctctaatcgcccgtccaacctagtaccagcgtgtattaaatgtaatgccatcaagggtaatcgttcgatagaggattttcttgcccatgacccagcacgattaaaacatatcctaatttttgctaagacaccgctcaaagacgccgctgctgttaacactacacgatgggcattatggcgagcgttgacggcgactagcttacttttggtagtaggcaccggagggcgcaccaagtacaaccgacaccagtacggcgtggctaaatcacatgtaaatgatgcggtgtgcgtgggaccaatggataatgtcaccaaaatcaccggattaaatcggcccttgttagctatcaaatgtatggggcgtggttcctatcgtcgcactcgttcagatgcacacggttttcccgtgggatattgcatgcggacgaagcgagtatatggatttggtacaggcgatatagtacgtgcggtagtacctaaaggccgttaccaaggaacgtatataggacgagcagctataagagcaaatggcttatttgatattaaaacgttcaatggattaaaatttgatacatcttataaaaattgcactttgctccaaagaaatgatggatataaatatggtattaaataa

SEQ ID NO: 1829 - DNA, 306 bp, Unknown
  Ga0210402_10005866 JGI
atcaacgaccccggctttaaaaaccggcttaccttaaataagtaagcgcgttgaacaggattagctcgcaagggctacgttgatcgggaggcaaaaactaccaacgtcagaatgcttcctcagttctgaccacttgaaatctcaatagtagacaagctacagggtatgcacgaaacggattgagatttagcggggaaccaagcgaaagcgaggtgaaccgtaaaaccgctcgacaacttttccgaggggaggcttcgtaagaggccgtaactaggcccgtaagggcacaccgaaggcaaaaaaatg

SEQ ID NO: 1830 - DNA, 1008 bp, Unknown
  Ga0136175_10101454 JGI
atggttgtatttgtaataaataaaaacggaaaggcattaatgccctgttccgctagaaaagcaagaattttactaaagaaaaagaaagctcaaatttattgctacaagccatttacaataaaattgctttacggaagctacggttacactcaacctacaagaataggggttgaattaggtgctaaatgtgttggaatagctatacttcaagatgaaaacatattagcaaaaggtgaaattacgctaagaagtgatgtaaaacaaaatattcaaacacgcaagctataccgtcgcagccgaagaaacagaaaaacgaggtacagagaagagagattcttcaacaggattaagtccagaaaggacggctggttacctccaagtataagaagcaggattgagaacacttttatgtggatagacaaattcaaaaagcttgttccgaatccagtgcttagtattgagcttggcaaaaacaagaatgaatttttagaaaacaaggatactacttttatgcacattataaggaaacgcataataaggagataccctcattctgaatttacatacaaggatttgactacgctcagaagaatagaattagacctagagaagacttattataacaacgccatagctataagtggtgctgagaaaataagaagaaataaaaggaatatattcaagattgtgcagttcagaaagaaaaaaagaagtctgcacgaagcaaaccctagaaagggaagaaagacaaagaacgtattgtcaaagagaaacgaaaagaacaaaaagcaaattaaaaactggtgccttaatgatactgtaagagtattcggcaaagttggatttatatgcggtttttccggtgggagtgcttgttatgtcaaagacataagcgggaaatatatagttcctgaaggcaaaaaatacaagcagataaatttgaccagtttaaagctaatgttaagaaacaacaactggcaatacggttgcgtaccgcttagtcaataa

SEQ ID NO: 1831 - DNA, 256 bp, Unknown
  Ga0136175_10101454 JGI
gttgattttcccgtactgccctagcagtacagccttaaaggcttaaccaactagcctaagttaattattatgctaacactgtttttaattagctacgttatttttcatacagaaacctgcgaatgataccctagtttgcagctctttcgcggctctgtaaacagctctgagggaaaggagcagtcaaccgtgtttaaaggttaaataacattggcgaagggtaaataactctaacaggagggaatacattatggtt

SEQ ID NO: 1832 - DNA, 1278 bp, Unknown
  human oral metagenome genome assembly, contig: NODE_46_length_124855_cov_3.86146, whole genome shotgun sequence WGS
atggttttagtaattgataagcgtaagaaaccttgtaatactataagtgaagcttacgctcgaatattactatttaacaaacaagcggtaattcataagagatttccgttcactataagattaaaaaacgatagtgctgtattgaaagatagagcctatactgtaaaggttgaccctggttcaagaaccactggaatagctattgttgataacaaggattcagtggttatgctagctgaaattgaacatagaggtcatattattaaaagaaacatggatagtagaaggactcttaggcgtcatcgtagacaaagaaagactagatataggcctgcaagatttctcaataggaccaaacctaaaggatggttagctccgagtgtgaagtctagagctgataatgtgataaattttattaagaaatataagaaatttttgaatattaataaagttatgattgagagtgttagcttcgatgtagctcaaatgactgcaaacaataaccttgtaggaactgcttatcagcaaggtcctttatatcaaaacaaacttagaagcttcatatttaaccgttcaaatggtaaatgtgtttactgcggagccaaagcaaccgagatagaccatatcgtaccaagagctaagggcggaactaacagcgtttacaatctagtagcatcttgcagaagctgcaatgagaaaaaatcaaacttatcactaaaagcttttggtaaattaatgggtaaagactttagtaagttagaacctaaaaaattgcctaaggatgcaagtattgttcaagcagctagaaactatatgtttcaagaaatagctaaaatcgttcctagcaccgtaggttatgatgcttggcttactaaatacaatagaaatgagctcggtttacctaaagaacattattacgatgccttatctgttggtgaaattccatctaaattcaatttcctcactgataaggtattacaaatatctgctcaaggtagaggctctagacagatgtgtagggtggacaagtacggatttccacgaacatctgctaaagcttcaaagtcagtttatggtttccagactggagatatggttaaagccatagttccaaatggattaaaaaagggagaataccttggtagagttgctgtccgctctaatggtaactttgatataaaagcaaacaaaaaaactatccaaagtataagacataaatattttcacataattcaaaaatgtgatggatatttatatagttataatgagcgatcttag

SEQ ID NO: 1833 - DNA, 314 bp, Unknown
  human oral metagenome genome assembly, contig: NODE_46_length_124855_cov_3.86146, whole genome shotgun sequence WGS
gtcaataacttggtaactagtttttactaagcttggttgaccagacttaggttagataacagataatgttgtcttaaactacgatagataggttatcacacccatacgatgcttctccagtctgtggctctgtgtaggctctgtaagttgggttaaagccctgtcaacctaggaacggctctagcaagcctatctatcattgtcgaggagagactaacttagaactttaattgggagcattagcttctggttaatagctgtaagttagcgtaacggtcgcaagactagattaactaaaaaaggaaaaatttatg

SEQ ID NO: 1834 - DNA, 1248 bp, Unknown
  human gut metagenome genome assembly, contig: NODE_1068_length_23742_cov_9.115844, whole genome shotgun sequence WGS
atggtatatgtgttaaatatcaatggtgttccacttatgccaactgataggcacggtaaggtaagaaaactactaaaagctaaaaaggctaaagtagtcaaaagaacaccatttacaattcaattactatatgtttcaacggaatatacacaaccattaactttgggcgtggatgcaggctcgaaacatattggaatatctgttacatcaagtaacaaagaggtttattgtggtcaggttgaacctcgtcaggatgtatctaaacttttagatgcacgaagaaaaatcaggcgttcaagacgaaaccatttaaggtatagacagccgaggctcaataaccgagtggcatctaaacacaaaggttggttagcaccgtctgtcgaatgtaaaatcaacacacatattaaggtaatagaagatattacaaaaatactgcctattactaatatagctgttgaagttgcagaatttgatacacaaaaattgcttaatcctgatatacaaggtgttgaatatcaacgaggaccgttgtatcaatcaaatttaagacaatatgtgttagcaagagataattatacttgtcaatggtgtaaaggtaaaagtaaatctaaaatacttcatctacaccattggaactattggaataatgaccatagtaataaaccgtcaagtttaattactctttgtgatgtttgtaacaatagtaaaaaccataaggaaaacggtttcctttatggttggaaacctaaaattacaaataatttcagagatgccgctttaatgaactgtatgcgttgggctttatacaacagattaaaggaaatatatccaaatgtcaaaatgacttacggatatatcaccaaagctatgcgttctgaacacaatataccaaaatcacatgtaaatgatgctttatgtattaccggcaatcctgatgtaacacgaatgaatacaatgtatctttctaaaaagaacagagtacacaatcgacaaatacataaagccaacaaacttccaagaggcagattgaaacttaatcaagcaccttatattgtaaaaggttttcgattaaatgataaggttttgtataacggcgctatctgttttataacaggcagacgaaaaaccggctattttggtctaaaaaatattgaaggacaaaccttatcaaattcggccaaatggaaagatttaacattgcttgaaaaagcaaaatattactctatagaaaggatttcaaggagttag

SEQ ID NO: 1835 - DNA, 335 bp, Unknown
  human gut metagenome genome assembly, contig: NODE_1068_length_23742_cov_9.115844, whole genome shotgun sequence WGS
gtcaactacccaccactgaagtagcgggcttgtaaagataatttacagcttttgccaagtggagaatttgatttaatcaaattccggttgattagtctaagtgttacgagcactacgttatttaagaaattaggcaccagtggatatagttccaagtccactgctctgcggtatgcaattaaacagtgactgaggggtaggaatacggtgttgcatacgttaaaccttaaaataacattgacgatggagcgtacagtatttattactgcataacaggaacttgtttcctgcattatttattaaattaaatttatagaaaggaatgcatatcaatg

SEQ ID NO: 1836 - DNA, 1395 bp, Unknown
  mouse gut metagenome genome assembly, contig: NODE_4542_length_6004_cov_2.376702, whole genome shotgun sequence JGI
atggttattactcttgataagcgcaaaaagcctttgggcttttgctctgagaaacgcgcccgcactctgcttgaaaagcggcgggcctgcgtttacaagtatttcccattcaccattattatcaaggacgccgatgtcaggaccatggaacctgttgcctcttaccgggtaaaaattgaccccggcgcaaagcacaccggcctggccatcgtccgcaattcggacaactgcgtggtgtattacctgcaggttgagcaccgtgcagaacgcatcgtcaagaatctcgaaacccgcaaagctgccaggcgaaaccgccggcagcgtgagacccgataccgcccatgcaagtggattaaccactacctgccgcagggcagcaaatacaaaacagagtctccccgcccggaagggtggcttccgccgtctgtaaaatccattggtgataacattatcaactgggtcatccgattgcggaagttagtaaacattaccacctgttcttttgaggcggtccggtttgatacccagctgctggacaatccggatatcagcggcgtggcgtaccaacaggggacactctttggttacgaaatcaaagaatacctactcgacaaatatggccaccagtgtcaatactgcggcggtgcgtccagggaccctgttttggagtgggaacacattgttcccaaatccaggggcggcagcgacagcataaaaaacgccacccttgcctgccatacctgcaaccaggcaaaggggaatctttctttagaagagtggctcgccaaagaagcggctgccgcggacggcaaagccaccaaggcaaaacaggagttagcaaaagcccgggtatcaggtatcgcccatgtcctgaaggggaaagcccccagaaaaagcaatcgctactgtgcctgggctagttcttcccgccggtatgttgagactgggctgttcagcatctttggcaacgtggaatgctcctctggcggcaggactaagttcaaccggcagatgctgaagctgcccaaggaccaccactatgacgctctgtgcgtaggggaaattccagatggtggctatacggacctgacgcatgggtactgcctgtacatcaaggctattggtcgtggcacccggttccgggggaaaatcaacaagtgcggggttatcatccaaaagctcgcaaaaacaaccaagcgcccattcgggttccagaatggggatattgttctggcaaatgccccagccggcaaatacaaaggacgccacattgggcgtgttatgaccagaaagtctggttgttttgatataaggaccacaggtgataacctggtaactgtaaaccacaagtattgcaaactcttacagagagacaacggctaccaatatcggtag

SEQ ID NO: 1837 - DNA, 338 bp, Unknown
  mouse gut metagenome genome assembly, contig: NODE_4542_length_6004_cov_2.376702, whole genome shotgun sequence WGS
gtcaactactcggctacaagtagccgagcttgacaaagagtaactctctttgttgagcctactgcttgtagattagttgagcagacatcagcaagtgctacgttaccaatcaggcggcccagggtgcttctccagccctggcgcggcgattcgccacgtgcggcgctacgccgcatgccgaggcatgcagtctaaacaggcaatccgagtacaatagccagtgctgcatgcgcgtaacggttgataacattgtcgaggagacggtgttctcttctctccattggggaggggagaacaccattacaagcccttaacagggactatttcttcagaaggga

SEQ ID NO: 1838 - DNA, 1500 bp, Unknown
  human gut metagenome genome assembly, contig: NODE_2011_length_11952_cov_14.972463, whole genome shotgun sequence WGS
atgagatacgtatatgtactggatgtggacgggaaaccgctcatgccgacctgccggttcggcaaggtgcgccggatgcttaaatccggacaggcaaaagcagtggataccttgccgtttaccatccagcttacctatagaacaaggacccgcatccttcaaccggttactttaggccaggatccgggacgaaccaatatcggtatggctgctgtccgttccgacggaaaggaactgggccggtttcactgcataacccggaataaggaaatcccgaagctgatggcagaccgcatggcagccagaaaagcttcccgacgtggagaacgtctggcaaggaaacggctcgccagaaagctgcatacaacggcaaagcatctgaatgggaggattcttccaggatgcagcgaaccgatggcggtcaaggatatcatcaacacagaatcacggtttaacaaccgtctgagaccggagggatggctgacaccgacggccacgcagttactgagaacacacatcaacctgttcgtaagactggcaaagattcttccggtcacggacgtggccgtggaactcaacaagttcgccttcatgcagctggataatccggagatgaagaaacgggagattgatttctgccgcggtccgttacacggaaccggaggcgtggaagcggcggtaaaggaacaacagggcggcaaatgtctgttatgcgggaaagaaccaatcggtcattatcaccatatcgtgccgcgttccagaagaggcagtaacatcgttcagaacatcgccggtctttgtccaaagtgccatgaacgggtacataaggatgtggataccgcagagagactgacggagatgaaagccgggctcacaaagaagtacggtggtacatcggtattaaaccagatcatcccgaaactcgtcacacagctgtcggaattattttccggccatttctatgtgacaaacggatggaatacgaaggaattccgtgagaaacatgacctgggaaaagaccatgatgtggatgcctactgcatcgcctgcagccacctggaatcggaaggggcactgatggaaaccgaaccgtttgagatcctgcagttccggaagcatagccgggcgaggattaaccatcaaacagaacgtatttataagttgggtggaacgattgtggccagaaaccgccggaaacggatggaacagaagacggattcactggaagactggtataaggatatggtaagccaatacggaaaagtcaaagcggataccatgtgttccaaattggctgttatcaaaagtacccggtactacaacacacccggaagaatcatgccgggagctgtgttcctgtacgaagggaaacggtacgtgatgaccggccagatcacgaacggaaagtactatcgtgcttacggccaggagaaacggaatttcccggcggcaaacgtacggatactccgcaaaaataccggattggtatttgcagcatga

SEQ ID NO: 1839 - DNA, 212 bp, Unknown
  human gut metagenome genome assembly, contig: NODE_2011_length_11952_cov_14.972463, whole genome shotgun sequence WGS
gtcaataacccatgactaaagtcacgggcctgcagatgcaggtcctgatggaagaaagggttattgagcagagcagagacatgtcattcgccgcggggtgattccaagccccgtgctccggttagacatgcccatgctatggaaactttaacggtatgtgcggttttccgtacataccggcttacaacaaataaggagctatcatgagatac

SEQ ID NO: 1840 - DNA, 1497 bp, Unknown
  Ga0136851_10002495 JGI
atgaaggtacacgtaatcaataagaatggagagccattaatgccttgctcaccacgtaaggcaagattattactgaagcaaaagaaggcagtacccacaaaaggtaaaacagggtacttcacaataaagcttctgcatggttgctctggttacaaacaacctattacagttgggatagatctgggtgctaaatatgttcctatagcagcaacatctggtaagaatgtcttatacgctaaggagaagattctccgaacagacgtgaaagggcaactagaggaaagagcagctgctcgaagacgtagacgcaatgatacacgttatagacccgagaggttcaacaataggacaaagcagaagtgtaacgcatgtggagagaacaacttacctaaagtatggtcaaagacaaaaagaactaatggacgttctttaaagaatgaagctaaaggaagggcttcgctctgcagaagatgtgcagctgaaggtagaaaaggtgtaggaggtaagaagcatgtattaatgccttcagtgaaaaatagagcagagagtattattaatgatatagacaaactgtcttattctttaccaataagtgaggtagttgtagagacagtatcttttgatactcaaaagatggctaaccctgacataaaaggattagagtatcaacatgatactaaggaagggatgggattgagacaatacatctttactataaataggcacaaatgtgtttattgtggtaaaggtataagtgagagaaagaagttaaatatagaacatatcattcctatttcaagaggtggtagttctttattagaaaatctcacatgcgcttgcaaggagtgcaataggatcaagaacgcacgcactcctaaggagtggttagattttctactatacagaaagaataagggagccaaactaaacgaaacagaagttacttggataaagaatcttcctaagttatcttctattaacaaagtaggtaagacttttacctacagtgcattatctcaatcttacaaatattacttattagacgagctgagagaaagatggaacacatctaccactacaggagtagaaacgaaatgggctagatctcaactacacttagctaagtctcagattatagatgcaatagtgattgcgtctaaaggtgaagaagtagagatccctaacatctatctaaaagagaaacagatcaagaagagatacccacacgattacataggacccattaagaagaatgtaaagagacatatctatcctagagaagatgaggtatatgggttcaggttgtgggatcgagtaattgccaatcatgctaaaaaaggtagaatggaaggctatgtaacttctcgaaggaaaagtggaagctttgctattagtaacttagatggtgagctcctaataggaggaatcagttataaaaaattagaacttataagaccttcactctctaactatgtaagagagtggataaaagcttaa

SEQ ID NO: 1841 - DNA, 274 bp, Unknown
  Ga0136851_10002495 JGI
atcgactatgctagtgagaaagtctactgtagatttacaggagtagaaagttataacttagattacgacagaaatattattactataagctctccatactataaaggagagatttcaatatctatgagatcattaagatctttagagacagcggacaaatctaagtatgtaatatacattgattgtacagaattcagttcacagaatagtgggtcatcaaacgctaaacctaatctaaaagcagtatatactaaaacaaggagggaagatgaag

SEQ ID NO: 1842 - DNA, 510 bp, Unknown
  metagenome genome assembly, contig: NODE_68_length_101563_cov_30.349657, whole genome shotgun sequence WGS
atgacaaattatgcttttgtattagacgctaatggaaaacaattagcacctacaaaagaacaaaaagcatggtttctaattcgtaaaaaacgtgcgacattggttaataaatatccaatggtaatacaacttaatataacaattccaaatggtggagatacagctaataaacgaattgattggaatattgaaaaatcacatagcaatgctgctatttgtattaccgacttgcaaccagatgtatatgaaattaaagagtggataataaaaccaatgcgtagacaaagtaaagctaagacagataatgttttaggaattaaacatagagatttagttgaatatacatttaaaaatggagaaacgcataaaggttatgtaaccgcgttatatccaaatcaaaatgctttaaatttccaaagtccaacgaagcattgtaaaaaagtaaatgctaagaaatgtaaattactttggaaatataataaaatttattggcctgaatgtgtatcttaa

SEQ ID NO: 1843 - DNA, 286 bp, Unknown
  metagenome genome assembly, contig: NODE_68_length_101563_cov_30.349657, whole genome shotgun sequence WGS
tattaaacataaataaaagtggacatataactttttgtttgtggcttaatagtaggtttcaagcctgagtgactgctactatcgaaagatatgttgtagatatgaactatgttagatagtaaggtaaaaacacacctttagatgtaatcttcagtctaaagctctgtgagtgccaaccaagaaacaatgctaatgtcctgcattgataacagggaaacacatattctctatctgacattggcaagaagagaaatgctccgaaagaaaggtgtcagaaatgacaaat

SEQ ID NO: 1844 - DNA, 903 bp, Unknown
  Ga0209636_10070277 JGI
atgagggggcaacctctcatgcctaccacacaacataaaggaaagaagttattacacgaaggcaaggcaacagttgtaaaacggtgtcctttcaccattcagttgaactatgccactggagagactacacaacccattaaattaggagtggatataggttttacgaatcttggatttagcgccaagaccgatacgttagaagttattagtggaactttaaccttgcgcaaggatgtctcaaacaagcttgaagaaagacggaagtatcgtaaaacgcgtagaggtagacttgggtatcgaccacctcgatttgataaccgaacacgtcctgaaggatggttagcccctagtaatcagcataggcatgagtcacatattcgattagtggaaacacttgccacgctacttcctataaattacaaaaggatagagactgcgaatttcgacacacagaaaatgcagcagcctgaaattacaggcgtagagtatcaacagggcacacttcatggttatgaagtcaaagaatatctattggataagtggggacgaaagtgcgcctattgtggcaagaaagcgattcctttagaagtcgagcatatcgtcccgaaaagcagaggcgggacagatagagtgtcgaatttgacgatctcatgtaggaaatgtaatctaaagaagggagacaagaccgccaaggagtttgggtatccacacatccagcagcaggcaaagacgcctcttaaagcggcagcatgtatcaataatattcgctggaaattagtagagcagttaggagcagaacatacgtacgggtacgtcactaaataccagcgtaacaagttagggctgaaaaaatcacatgttaatgatgcttttgtcattgcgggaggcacaacacaattaagg

SEQ ID NO: 1845 - DNA, 289 bp, Unknown
  Ga0209636_10070277 JGI
gtcaattaccccgccctgacggatggggcttgttccgtgaggagcgagagcaattagttgattagcctaagagaggtcatggtgaaacacacatggcgatatctgagttatcagcagagttaaagaacacaccaagggatgcttctctagtcccttgctctgtaaacggtggtttaaacagagaggaaactctcagtgatcatcgtatagtactgactgataaccttggcgaagagaaccaacctactttaacgcacgttaaaggaggagataggacttgagagtacct

SEQ ID NO: 1846 - DNA, 696 bp, Unknown
  Ga0209827_10194947 JGI
atgactttcgtctttgtgctcgaccgcgacagaacaccgcttgacccgtgtcatccggcacgggcgcggcagttgttgcaccagggacgcgcctccgtgctgagacgctatccctttaccattatcttgcacgaccggcctgcggtgcaggcgcaggcacaacagcccttgaaagacgccgcagccgtcaacgccacccgatgggcgctataccggcaactctgcaccacgggcctgcctgtcgagtgtgggacgggtggcaggaccaagtacaaccgcacccgccagcagctgcccaaagcgcattggacggacgccgcctgtgtgggggtgagtacaccagagaccctgcgcgtctcagggttacagccactgggtatccgcgcgatgggccacgggacacggcagatgtgccggacaaataagtatggcttccctgtacagcaccgcgcacgacagaagcgctactgtggcatgcagacgggcgatctggtcaaagcggtggtgcccagcggcaagtatcaaggcgtgtggatcagccgcgtggtggtcaaggccagtgggtggtttgatctcaccattcgcggcaagaaggccagtgtgcaccagaagcattgcacgcggctgtgggctgcggatggctatacatacaccctgcctgcggtcgccggcaccgccgtttcctccccccgctga

SEQ ID NO: 1847 - DNA, 260 bp, Unknown
  Ga0209827_10194947 JGI
ggctcagtcgacgtactcccccgactgcagtcgggggattctagggaagcctggaatcggtgtcgagcagacttagcccttcggggctccgttcagcaggtcacgataccctgaagtgcgtgccagcttcaggctctatcgtttgccgttaaaccgtcgtggcgagtaccacaccgtgcggcaagcctgacaagcctggtgaacattgtcgaggcatacgtcaccgccgcaaggcgcgtatgaggtaactcatgactttc

SEQ ID NO: 1848 - DNA, 1293 bp, Unknown
  human gut metagenome genome assembly, contig: NODE_1604_length_6656_cov_3.864566, whole genome shotgun sequence WGS
atggtatatgtattagatcttgatggacagccgcttatgcctactaacaggcatggtaagatccggcatcttctcaaagatggtctggcagaagttgtaatgcgctgtccatttaccatacggttgctgtatgacagcacatgctatacacaggaagtcgtgttaggtgtagacaccggtagtaagcatatcgggctgtcagctactacagaaaccaaagaactctatgcttctgatgtggagttgaggaatgacattgtggatctgctttctacacgcagacagagccgcaggttccgtcgtaaccgaaagacgcgctaccgaaaagcccggttcaaaaatcgggtatcttccaaaaaggaaggctggatcgctcccagtgtccagcagaaaattgatacccatctaaccgtggtatccaaagtatgcaggatgctgcctgtcaccagaattgtcgtagaaacggctgcttttgatattcagaagattaagaatccggacatccagagagctgaatatcaacagggagaccagcttgggttctggaacgtccgggagtatgttttattccgagatgagcatacctgtcagtgctgcaagggaaagtctaaggacaaaattctgaacgtacatcatattgaaagtcgtaaaactgggggtaatgctccgaacaatctgattacgctctgtgaaacctgccatacgggttatcacaaaggcaccgtacaattaccaaagaccatcaagcgaggtatgacattccgggatgctacattcatgggaatcatgcgatgggtattttataacaagctaaaggaagtttataggtcacatggagtggaagtacagatgacattcggatatatcaccaagaatacacggatcgcccaccatcttccaaaagggcattgtgtagatgcgagatgtataagcggtcatccagatgtagagccaattggtgaaatattctatcaaaagaaggttcgctgccataaccgccagattcataacctaaccattttaaaaaatggggttcggaaacggaatcaggcagactatctggtaaaaggctacaggttgtttgataaagtatcctacggaaacaaggagtattttgtttttggacgtaggcagagtggattcttcgatttaagggatctgtcaggtaacaaagtaaacaaaggaagtctcagttataagaagatcagatttctggaaccgagacaatcttatttgtgtgaaaggagaagaaaggacacacaaaggatgcgcttaattgcgatcctcccatga

SEQ ID NO: 1849 - DNA, 270 bp, Unknown
  human gut metagenome genome assembly, contig: NODE_1604_length_6656_cov_3.864566, whole genome shotgun sequence WGS
ctgtcaataacccatcactaaagtgacggacttgtaagcccgggattgactagcctaagtgctatgagcactacgttaagggagaatatatagtcacctgcagatgttatacctagtctgcagctctgagatccgtgattaaacagccctgctgggtagggacagtgttacggatacataaacctcccattaacattggcgaaggtatcattacaggggtgtatcccctgagttatgtgatttagttcacagaaaggagtgcctgttatg

SEQ ID NO: 1850 - DNA, 1314 bp, Unknown
  Ga0209648_10006185 JGI
atgtccagggtcttggttgttgatgcagcacgtcggccactcatgcccactacccctgcaagagcacgtatactgctcaaaactggcagggcggcagtgctgcgtcgcttcccgttcatcctcattttgaaagaagcaaagcccgaagcggtggtccagcccttgcgcctgaaacttgatccaggcgcgaaaaccactggcctggccgtggtcaacgatgcttcaggagaggtcgtgtgggccgcagaaatcacgcatcgcggagaccaggtccacaaagccctgatcaagcgcgctcttgtccggcgcggtcgtcgccagcgacacacccaataccggcaagcgcgttttgcaaaccgtcggcgccccaaaggctggctcaccccctcgctgctctcacgggtccacaacgtgctcacctgggtgtcacgtctgcggcgcttctgtcccattggcgccatctcgtatgagttggtccgttttgatatggccctgcttcaaaacccaaacatcgaggggatcgagtatcaacgcggaacgctgtggggcgtggaagtgcgccagtacttgcttgccaggtgggagcatcagtgcgcctactgtagtgccactggattccccttggagattgatcacgtgattccacagagtcacggaggcagcaaccgggtggccaatctggtgatggcctgccgggcgtgtaacctggcgaaaggggacaagccgctggaagacttcctggcagaccgtcccgaggtgctcgcacgcgtccaagcgcaacgcaaagctccactcaaagatgccgctgtggtcaatagtacccggtgggcactccacaagcggctgggcgcgctgggcctgccgctcgaaaccggctctggcggcctcaccaaatggaacaggcagagcagggagcttccgaaggggcactggatcgatgcagcctgctgcggaccctcaactcctccggtgctgcgtctacaaacagtgcgtccctggctgattgaggccaagggccgacaagctcgtcagatggtcaacgttgaccatctgggattccctcgtagcaaaccaaaagggccaagccgggtacgaggatttcgcacaggcgatctggtcaaagccgtggtcccaccgcatctcggtgcgaaaggcgtgcatatcgggcgagtcctggtgcgcacgcgcggcacttttgacatacagaccaggcatggacgagtcaaagatattcctgcacgctattgtcagagtttgcatcaaaacgatgggtatgtctatcagcttggggcggcgcttcctccgcatgcctga

SEQ ID NO: 1851 - DNA, 306 bp, Unknown
  Ga0209648_10006185 JGI
gtcagcgaccccagcgctaaaacgcggggcttgcacaggtcaagccccaatgctgagcagcctcctgcttgcttgcaggcaggagcagttaggaaggaacgtgtaggcaccggcagatggtttttccagtctgctgctctgcggccatccattaaacaggtgaacggggaagtagagccagtgtggatggcatttgaaacccttctataacgcgggcgaggaaaaccttacctgtctggcattccggtgccggacagcgttgctcccttatcggagccacagatcaggagtcaaagcatgtccagg

SEQ ID NO: 1852 - DNA, 771 bp, Okeania sp. SIO3B3
atgaataaaaattccgtctttgtactggatacaaatagaaaactatctaatccagtacatccagcacgagccagaaagttattaaagcaaggtaaagcagcagtgtttcgtagatatccatttaccattattttgaaagaggaatcagcaaatgaagtaaaggaattaagactaaaactagatccaggaagtcgcttcacgggattagctttgttatcagacactaacattgtttggtgtgcacaattagaacatcgaggttttcaaatctcggaagctttaactaaacgtagaactttgagaagttctcgtagaaaccgcaaaactcgttatcgtcagccaaggtttctgaatcgtaagcatcctaaaggttggttacctcctagcttaatgtccagagtatttaacatagaatcttgggttaagaaacaaggttatcagcctttgttaattaaagctatggggcatggaagtagacaaatggtcaattcagataaatatggctttcttcgtggccagccaaaactcagacaaaaatcattctatagttttatgactggcgatattgttaaagctgatattcctaaaggtaaatatgcaggtactcatactggcagaattgctactagaagaactggaagctttaaactcaaaacatcaactcaaacctttgatgttaaccataaatattgtcgtcatatccataagtctgatggttttagctacagttttggtgaattagtcaagtacaaagtcaaaactgataactaa

SEQ ID NO: 1853 - DNA, 262 bp, Okeania sp. SIO3B3
gtcagcaccccgctctaaagagacggagcttcgtgcatcgttgatttaggtatgctgacccggctaagtcttaactgactacgttattagtaagagttaaaagtcctaccttgaaatacctcacaagtttcaagctctagaatcagatagttaaacagtcctacgaggggtaagacagtgctatttgaaaagtaccgactaataacatagcttatgtgacttttaccctagcaataggagtttttcaatgaataaaaattcc

SEQ ID NO: 1854 - DNA, 1098 bp, Scytonema sp. RU_4_4
atgcaacgagtaccagtgttagataaagacggcaagccgcttatgccaaccaaacccagtcgggctagacgttggcttcaagaaggcaaagccaagattgtacgcaatgacctgaatgttttttgtattcagctattagtagaaccatctggatgtggcactcaaccaatagctttgggattagacccaggtaaaagatttactggtgttggtgtccaatctgccaagttcactttgttcatggcacatctaattcttcctttttctgatgtgacaaaaaagatgtcaggaaggctgattttgcgacgtgccagacgaggtagacgcatcaaccgtaaggttgcattcaacaaaagagcgcatcatcaaaaacggtttgataaccgtaagcagaacaaattgccacctagtattcgggctaataaagaactggaattacgagttaccaaagaattggtaaaactgtttcctgttactcaaatcacttatgaatatgtcaaagccaaaggtgataaaagatttagcccagtgatggttggtcaaaaagtgatgttgcaatggttggaaaagattgcaccaaccaaaatccaagaaggttggcagacttcaatactcaggcagcaactaggtttagctaaagacaaaaaagataaatctaggcaaagtcctgaaactcatgctcatgatggagtggcgttggctgcaagcaacttcatgaagtttgagaaatttcagactgcaaatagtcgtggtcatcgctggagaggaggaatcacagtcacatctgcgccatttcgagtgattgctcgtcctaatctgtttcgtcgccaacttcattttgagaatcctgtgaaagatgcaccaggtaatagaaaacgtaaaggtgggacagtaacaccttttggttttcgctctggcgatttagtcagggctgaaaaagcgggtaagtcgtattttggatgggttggtggatatactcaaacacccaaaaccaagaatatttcggtctataaccacaattggcacaggcttggacagttcagcccgtcaaaggtgcaattaatcaaacggagtacgagattatgcgtagcatcctaa

SEQ ID NO: 1855 - DNA, 219 bp, Scytonema sp. RU_4_4
gtcaactacccacactgatctgagtacagatacagtgtgggcttgaaagaaccagctttcaacgcaagagatgactagccccaccagacttgttttgttacagacttccgaatgtttccttagttcggattatctctaagcctactggttgtaggcgcttgtagaaaggacatgctagacaagttgggctaagggacttattactttctcgtaaggatt

SEQ ID NO: 1856 - DNA, 1266 bp, Unknown
  human gut metagenome genome assembly, contig: NODE_59_length_61911_cov_6.971902, whole genome shotgun sequence WGS
atgatttatgtaaggagcaaggatggtaaggcattgatgccaagtgagcgtggagggaggataggctatcttcttcgccatggcaaggctcatgtagtcagccgtgttccgtttgtcgttcagttggattatgagagcaccatctacacacaggaagtgagccttggcattgatgctggctcaaagcacattggcgtttcggctagttccgagaagaaggagctgcttgcagcgcaggtcgagttaagaagtgatgttgtgaacttgctatctactcgcaaggagttgagaaggacaaggcgaaaccgcaagacacgttaccgcaaggttcgttttgataaccgcaagaagaaagatggttggctagcacctagtgttgagcaaaaggttgagagtcacttgaaggttatccgcttggttcgtaagttacttccaattacgaagaccactatagaggttgctccgtttgatgcgcaaaagattaagaatcccgacatcaagggtgatgagtatcagcaaggcgagcagatgggcttttggaacgtgagggagtacgttttggctagggatgggcacaagtgtgttcattgcaagggcaagagcagagaccctatcttgaacgttcaccatttggagagccataagactggtggtaattcccctagtaatctcgtaacgctttgcgagacctgccacaaggcttaccatcgtggggagttcgacttgaaaatcaagcgtggcacaactttgcgtgatgctgcggtgatgaacattatgcgttggtcggtgtatgaacgagccaaggctgagtttgggaatgtgtacttgacctatggttacattaccaagcacactcgcatagagaatgatattgagaaaactcatgcagccgatgctttctgcattgccaagaacgtacacgcaaggcggtcgagaactttctttatgtgtcgttgtgtacctcgccatacgagagcattgcacgttgcgaacccgaagaaaggtggtattcgtaggtcttgcattgcctctcataagataggcaagtctcgctttcagcgtttcgacatggtatggtggaaaggcaaggaatgctttatctttgggagcacgcacggaagaccaatattgcgtgatgttgaaggaaagcaaattgcaggacaaccgagtgtgaatatcaaaacgataaagtttttaaagagattaagaaataacattttagtggaagaaaggacttccgaaagttggatagaaaatgaaagttag

SEQ ID NO: 1857 - DNA, 278 bp, Unknown
  human gut metagenome genome assembly, contig: NODE_59_length_61911_cov_6.971902, whole genome shotgun sequence WGS
ttcaagtttcggaagcctttgattaggctacagcgattatccattcaatcgtccggagcggattagcctcagccccgaatggaattagggagctacgttaggggtgaatgcataggcacgtcaggatgtccgtccaagttctgacctctgcggttcgtggttaaaagtggcgaaagctgcggtgctgcgggcaagaaaccatcctataacattggcgatgggcgcacaaccacctttcgaggtgagatttattaatttgattaattgagttgattatg

SEQ ID NO: 1858 - DNA, 1287 bp, Unknown
  Ga0302251_1000232 JGI
atgcagttggtgttcgtgctggaccggaagaagcaaccattgatgccgtgccatcccgcgcgggcgcggcaactgctgcgggcagggcgggccgtcgtccatcgcctgcgcccttttaccatccggctgaaggagcgcgtgggcggatcggtacaacccatacgcctgaagctcgaccccggcagcaagaccaccgggattgctatcgtgcgcgagtccgaggagcaagcggtcgtgctgcacctggccgagctgcaccacaagacggacatcaagaagaaattggatcaaaggcgggcctatcgccgcaaccgccgcacccggaagctccgctaccgcgctccgcgcttcctgaaccgcacccgcccggaggggtggctgccgccgtccctgcgggcgagggtggataacatcctctcttggctgcgacgctatcggcggctggcgcccgttacggccctctccctggagctggcccgcttcgacacgcaggcgctccagaacccggaaatcagcggggtacaataccagcaaggcgagctggcgggttacgaagtgcgcgagtatatcctggccaagttcggccacgcctgcgtctactgcggcgcgaccgacgtgcccctggaggtcgagcacgtcgtgcccaagtccaggggcggcagcgaccgggtgagcaatctcgccttatcctgtcacgtctgcaatcagcggaaaggcgaccgcaccgccgccgagttcggacaccccgaggtgcaggcgcaggcccgccagccgctccgcgacgcggcggcgatcaacagcacgcgctgggcgctgtggcgggcgctggcggcgacgggcttgccggtcgaggttgggacgggcgggcgcaccaagtacaaccgtactcgcctgaacctgcccaaaacccacgccctcgatgccttgtgcgtgggcttgtccacgccggagcgcgtgcgactgaatggcgcggggctactcaccatccgggcgcagggccgcgggcagtatcggcgcaccctcgtgtctgctagcggtttcccgcgtgggtacttgatgcgccacaagatggtgcgaggctttcgcactggcgacgtggtgcaggcgaccatccccaagggcaagtatgcgggtcggcacagcggcacggtgctggtgcgcgccggggggtattttgacctgaagcgcgcgggtcgcctggtggcccaggggattgccgcccgctattgcaggagagcgcaacggtcggacgggtatgggtatatgctttcgcccatccccctttag

SEQ ID NO: 1859 - DNA, 324 bp, Unknown
  Ga0302251_1000232 JGI
gtcaatcacctcacggctggacgccgggggcttggggggcaactccataagcctgattgaccagggctagccgggaagcctgacgaacggctgtacccggctacgttggcgataggatagtagacccaccggcgggcgcttcctcaacccgccgctctggaaggactggcggcagacaggctcaggggtaagcgcgaaacgcgccagttcggggggccaccacccccacccggtcgccaacaggtccgaggggagccgcgcgggaaagtcggcccgcgcgcgtcacccgcgtaagcggggtggaggtaactccaaatgcagttg

SEQ ID NO: 1860 - DNA, 1239 bp, Hymenobacter sp. CCM 8763
atgtctaataaatattgttttgtattagattatgatggtaaaccattatcaccaactaaagaaaacaaaggttggtttctaatacgtaaaggtaaagcaacattagaaaagaaatacccaatgaccatacgtttaaataaacgtgtagaagataaagacttagataaatcaaaaatgcatgtaggtattgatgatggttctaaacatgtagggttatctattgttcaagaaggagagactaaaaataaagtagtttttaaatctacaatagaattaagacaaaatgtaaagaaattaatggatacgagaagaggtttaagaagatacaaaagatatcataaaagatacagaccttcacgttttaataatcgtaaatcttctaggaatacaggtagattagctcctagtattaaacaaaagaaacagtctattatacgagtagttaaagagttaaacaaacacataagatttaatcgtattcatttagaagatgtagctattgatactagagctatgacagatggttacaaaccttataaatggcaatatactaagtctaatcgtttagatgaaaatatacgtaaagctgttattatcagagataataatacttgccaaatgagtggtaataaaaatgtaagaatggaagttcatcatattattcctaaacgtttaaatggttctaactctataaataacttaattactttgtgtacagaatgtcatagggaagtaacaggtaaagaagaacaatacattgattatttacaatctattgtaggaaagaaaacaaacacctttttaaatcatgcttcacatgtaatgataggtaaaacttacttaagacaagagttatctaaaattgcctccataagattaacaacaggtggggacacagcaaataaacgtattgattggaatatagaaaaaacacattctaatgatgcaatcgtaattacaaatttaattcctagtaaggatttaaatatagaagaatatgtagttaaaccaataagaagaaaaagtaaatctatttataataatgttaatggaattaagcatagagatattgttcaatatacttatagaaatggtgacacgcatataggctatgttacaggtcttatacctagtagaaaggctattaatttccaatcgtcaacaaagcattgcaaagcagtcaatgctaagaaagttaagttattatggagatttacaaatatgtattggttaacataa

SEQ ID NO: 1861 - DNA, 310 bp, Hymenobacter sp. CCM 8763
tagaagattatttaggtaagaaattagaagtttaaaataaaggacttacttatttagttggtctcaagcctcagtgactagggggttggaaacaacgtatcctagatatgaactacgttagaggataatggtaaagacttaccttcagatgcacgctttagtcggaagctctaagagtgtgaacaaagaaacacttctaagtcatttgatatgaagtgataacatggaagcacatatccaccctttgacattggcaaaaagcaaaataccacgaaagtgaggttagacagaaatgtctaataaatattgt

SEQ ID NO: 1862 - DNA, 810 bp, Unknown
  Ga0070707_100063183 JGI
atgtcgtgtgtctttgtgctggataccgagcgccgcccgctggacccggtgcatcccggcgccgcccgccgcctgctctcccagcgggaggcggcagtgtggcgccgctctccgttcaccctcatcttgaagcaggcggtgccggaggccgccccgcagccagtgcggctcaagctcgatccgggcagccgcaccactggcctggcgctggtcaaggagccgacggcagccccggcagcggaagatacggcatcggcgccgctggccgagacggggcgggtggtgtgggcaggggagctgacccaccgggggcaggcagtccacgagaaactggcggcgcgccgagccgtgcgccgctcccgccggcagcgccacacccgttaccgtccccgccgcttcgagaaccgccgccggccggcgggctggctgccgccgtcgctggaaagccggctcgccaacgtggagacctgggtggcccggctctgccgcctgaccaacgtgacggcgatcagccaggagttggtcaagttcgacacccaggcgttgcagaatccggagatcagcggggcggaataccagcaggggacgctggcggggtatgagctgcgggaatatctgctggagaagtgggggcggcgttgcgcgtactgtcacgccacgggcgtgccgctgcaaattgagcacatcgtgcccaaaacgcgccccggcggctctgaccgtgccagcaatctcacgctggcctgcgcgccgtgcaaccagcgcaagggcacgcggaccgccgaggaattcgggcacccagaggtgcaggcg

SEQ ID NO: 1863 - DNA, 302 bp, Unknown
  Ga0070707_100063183 JGI
gtcagatacccccggctgaagccgggggcttgcacggcggcaacgccggggaggccccacgtctgaccagcccccgctctcgcaggggagcggagccgttcggagcgaatgcataggcaccggcgggtgcttcaccagcccgccgctctgcggctagcggttaaacaggtctacggggttgtcaccagtgccgctggcaagcaaaggaaaccgctcacgaacacgggcgaggtgagcatcacccgcgcaagcggaggcccgcgagggcaccagaactgaaaggtcgttcgtgtatgtcgtgt

SEQ ID NO: 1864 - DNA, 1497 bp, Unknown
  Ga0307376_10008654 JGI
gtgaagcaaagtgagagaaggccggatcagaaaccgatttttgtgatatcaaagtcgggaaggccgttggccccaacacgtcggccggggcgggttcgctacctactcaaaagcggttgtgcgcggatagtatgctatgacccctttgccgtccaactgctgtacgactgtcctgagttcgtgcagtgcgaggtcaccgtcgcaatcaaagaggattcgaaagatacgacaattgttgccgcagaacacattacaagatcggacacttgctccatagtctacgctaaagagatcttgcagcgggctggcgtttcggctcatgtgaaacgccgtacggacgcccgccgcagccgcaggaaccgcaagacccggtacagaaaaaaacggttcgacaaccggccaaaatccttatgttccatttgcggtcgaaaccacaccccgaaaacctgggcaaaagtcgaacgcaagaccggcacaagtctaaagaaggtaggagtcggtagatcggctgtttgtcgcaagtgcgaacatcaggggcttggcgagcactttgggcgtcttgccgaaaaacatctcaccccagcgctacggaacagagttgatgctaccgtacgcgaagtagggaaattgactgccatcatgccagtgacgaagataatgatggagcctacggcaccttatgcccaaataatggcctatttgaatgggcaacttaataaacctgcatcgagcaccatgtctgggcatactgttattgttagggagtaccttcttggaaaacacgggcatcagtgcgtttactgcaaaggtcaaagcggcgaccgttcgcttgtcaaggaacacgtgattccaaaatcacgcgggggaagcgatgccctatataacctggtgatatcgtgcaagacctgcaatgatgcgaagggggcgaagacggccgccgaattcggatacccggagattaacgagatggctgcgaagtttcttcgtgtcggatggggcgccattatccaaaggtaccagcggatgctctggcaggagttcgagaaatcgggcacagcggtcgaggtaccgtttggcagttgcacaaagcataacaggcttaggacaccgttgccgaaagtgatatacacaatggtggtagccgccaacggcttgaagtttgcccccccgaaggaatacatggtcgaaaagcgattaaaaataaggagtccttttcatcgatttaccaatgagaacagaaaagggtggccatgtaggaagaccctttccatgagagaagtcggtgggtttcaattgcacgacgaggtctcgtttatcgatggtaacggatcaaaaacctgctgttacattactgctttgcgtaaggacggatcggcagaagtgtctgacttggaaggaaatcttatttcaaaaaagagcttgagaaagctcacattggaacataacgtgtatcgaaaaaggtttatcgagcgtcgacgttttgaggggaataattga

SEQ ID NO: 1865 - DNA, 373 bp, Unknown
  Ga0307376_10008654 JGI
tctacctacccagcgccctgagaccgtggttggacggaggattcttgaacgtcttcctcgtcttaaggcggagcgaaggctccataggagacagcctaagtcttaagtgactacgttcttccggttaacagacagtcagatgaaacaagacccttctccgggttagccagtctggcataactttctggaggctctgtaaaagccctttgggggatggggcagtcaacctcgggacggcccgccgttgcgggcaagccggtagaacattggcggggaagtgaacgggcggaaagcccgcattatctccctttcgggagaacaccaaaggatgctgtgagtgaagcaaagtgagagaaggccggatcagaaaccg

SEQ ID NO: 1866 - DNA, 1164 bp, Unknown
  Ga0209096_1014402 JGI
ttgcagcgcgttttcgtagtggacaccaacaagaaaccattgagcccctgcacaccggccagggcgaggatgctcctgcggaagggtaaggcggcggtctatcgccgggaacccttcacgatcatcctcaagtacgggattgaagaacccgtgccgccggtagagttgcgaattgattccggcagcagaaccacggggatcgccctggtggggaagtgcaagaagggggaccaagtggtatgggcctgcgagttggaacatcgggggctggccgttagggatgctttaacttcccgcagggcaatccggcggggacgcaggaacaggcatacccgctaccgccagcctcggttcaataaccgtacccggcccgctggatggctgccgccttcccttatgtcacgggtaaataacgtcgttacgtggtcggggaagatcctcgccctggcgcctgtagcctccatcgccgtcgagaccgtccggtttgacacccaggcgctccagaatccggagatcagcggtatcgattaccagcgggggacgttgttcggttacgaggtccgggagtacctgctggagaagtgggggcggaaatgcgcctactgcggggcggagaacgttcaattggagatcgagcatattgtccccaagaaacccattcgagggccacacggtacggacaggataagcaacctcaccattgcctgtgtcccgtgcaatgaggacaagggcaacaagcctatcgaggagttcctcgccggcaagccggaggtcctccggaagatactcgcccaggccaagaagcccctgatcgacgcggcggcgatcaatgctacaaggtacgccattggcaacgcgctcaagtccctgaacgtgctggtgtccttctggtccggagggcgcaccaagttcaaccgctccaagcaggattatccgaaggcccactggatagactctgcgtgtgtgggggaggccggcgggcaagtgttcctcaagccggatatgcaagccctgaaggtgaaagcctgcggacggggcacgagacaggtggtgaaatccgacaagtacggctttcctcgtactgccgccggaagaatcaaaagggtacacggcttccaaacgggggacatggtaactctcaaccaaaccactggcaagtacgcc

SEQ ID NO: 1867 - DNA, 286 bp, Unknown
  Ga0209096_1014402 JGI
gtccgtactgctccggcggtatggggcaactcgctcaaccagactcggcccgatagctcataacgtgttgtcgggctacgttaccggcgaatatataggcactccgggatgcttcgccagtcccggaccttgcggcaggtggtcaaacagcgcagaccagggaaatgagcagtgctgcctgcacacaaaccgccggataacattgtcgaggcgacctttaccgggggaacccgagtaaccggacgggaaaccgtccacccaatttgaaggagagattttgcagcgc

SEQ ID NO: 1868 - DNA, 1236 bp, Tissierella creatinini
attatggtctatgtgctaaataaagatggcaaaccattaatacctactaataggcatggtaaagtaaagcacctgttaaaagaaggtaaagctaaggtagttaaaagaacaccatttaccatacaactgctttatagtactactgaatttgtacaacctatcacattaggtgttgatgcaggtagtaagattattggtttaagtgctacaacagaagatgaagagttgttttcatccgaggtagttttaagaaatgacattgtagagctattatctacaaaaaggcaaaatcgcaggacaagaagaaaccgtctacgctacagaaagccaaggtttctaaatagagtaaaagctaaaaataagggatggttagctccatctattaggcataagatagatagtcatctaaaggttatagctaatatatataagatattaccaataagtaaccttattatagaaacggcttcttttgacatccaaaagattaaaaatccacaaataagcggcaccgattatcaagaaggtgagcagttaggcttttggaatgttagagagtatgtaatgtggcgtgatggtcatgaatgccaacattgccatggtaaatctaaagataatgttttaaatgttcatcataagataagtcgtaaaactggtggtgactccccaggtaatttagtaacactttgtgagacttgtcatagtttacaccatcaaggcaaactcacattaaagataactaaaaataagtcatacagggatgctgcctttatgggtattatgagatgggctgtttataataagcttaaagagatatatccaaatgtcactatgacatatggttatataactaaaaataatagaattactaatggcatcgagaaaactcatactgcagatgccttttgtatagctggtaatttaaaagcaaaaagaagtagcgtaatctaccttcaagcattcaaaagaaggcataatagacaaatccacaaagctaacttcttaaaaggtggtaagaaaaaactaaatcaatcgccttacatggttaaaggctttagattgtttgataaagtactgtttcaagaacaagaatgttttatctttggtagaagagctactggttatttcgatttaagaaaattggatggtacagtaattcataagagtgcaagtgttaaaagtattaaattattagaaaagaaaagcacactattaatagaaaggcaggtggcataa

SEQ ID NO: 1869 - DNA, 290 bp, Tissierella creatinini
gtcaactaaccctcgactaaaatcgaaggcttgaagtagtacagcttttgggtctattttaagcctggttgattagcctaagtgctttgggcactacgttgtttttgtcataacacccatgggcgtttaccctaacctgtggctctgttgcttgtgattaaaagttctcgagggttaatgggaacggtgttgcaggtgtaaaaagcaatttacaacattagctaagggtatttaaccagttatttaactggcattatgtatttaactacattaaaaggagaagtattatg

SEQ ID NO: 1870 - DNA, 1503 bp, Unknown
  Ga0208687_1000090 JGI
atgaagaaacgagacagaagacaaacacccatccgcgcctccctaacggctggctgggctgatgctgtacctgagagtacggaggtaaaacctgacacagctcaatgctgcgctcagcttgcgctgattacagcttctgctttttatctcgatggcgaagggacgtctagaaatttggaatcgaaagaagacaaatctaaggatactgctaggattatgtccaaacaattatctgagacgaagaaaaaagaattaaaagaagaaagaaaaaggaccaaaaacaattatagagtaccagtcttgaatccagatggaactccagctatgcctacgacaagtaggagagcgaataaatggattaaagaaaagaaagcaaagatagtcaaaaataaattaggaatatttcagattcaattacttttcgaaccaagtggaagaaagaaacaaccgatagtaatgacagttgatcctggatcagcatttacaggaataggagtcatatccaaaaagtctgtgttatatggttgtacattagaattgcctggatacaagcaaggttctaaaccaaagattgagaagaataaatttggtaagaaagttgagaaatatgcgaatgctatagttgaaggaatggataagaggagagaattaagaagaggtagaagacatagaaattgtcgaagaagagaagagagatggttaaatagaagtagatctaagatccctccttcaatacttgcgagaaaacaattagaactgaaagttgcaacaatattagcaaaaatatatccaattataatgattggttttgaagatgtagcattcgatcattttaaagacacgaaaggtgtaaaaggtcaattctttcctcatgttgaagttggtaagaattggatattgagagaactgagaaagatagcaccaagaggagttaaaataataaaaggatatgagactgctagaatgagaagtttgttattgatgaaaaaggaaggagataagactgttagatctgttgaagcccatgtcaatgattgtatagcgatgggagctatgatgtttaatggcggagttgagactaagaataaattcaaatatgatactattacaagacctaaatattcgagaagaattctacatttagaacaacctacaaaaggtggggtgagaagaagatatggaggaacgacttgcattgataaatggacaaatattaggaaaggtgactatgttgaagcaagacaaggagagaatgtgtatagatcttatgtgtctggatttactaccatgaatggtagaaattatatatacgtgtctgatttcgactggaaaggatttggtaaagatagaacacagacagcgatcgtaccgtctaatattaagatattgagtagaaatagtggattattggtaagaagtatggtaaaaattatgacaaaagatgaattatttgacaataaaactgggacagtacagatgaatattgaagatgcatgggggtaa

SEQ ID NO: 1871 - DNA, 264 bp, Unknown
  Ga0208687_1000090 JGI
gtcaactacatcgccctagcgatcagcgctagctgagagcttatgccggcttgccggcacactaaagggcggtgcttgtatctcagaatacaacatgagagttaactagcctatcggagaaatacagaatctatgaagaaacgagacagaagacaaacacccatccgcgcctccctaacggctggctgggctgatgctgtacctgagagtacggaggtaaaacctgacacagctcaatgctgcgctcagcttgcgctgattaca

SEQ ID NO: 1872 - DNA, 1317 bp, Petrotoga mobilis
atggaaaaggaatctgtacaacgagtttttgtattagataaaaacaaacaaccacttatgccatgtcatcctgctagggcaagagagttattgaagaaaggtaaagcagcagtatttcgataccatccattcacaattattctaaaagatcgtgaaggcggcgacacgcaacctatacaggttaagatcgatcctggaagtaagatcactggagttactttagtaggcgattttaagaacggtaagaaagtaatttggggtgctgagattcatcacagaggtcaaagtatcaaaaaagcattagatactcgtagaggtgtaagacgttcacgaagaaaccgaaagataaggtatcgtatagcaaggtttgacaacagaaaacgttcaaaaggttggttaccacctagtcttataagccgtgtagaaaatatactcacatggattaaacgtattcgacgcttttcaccaattacaggtatttcattggaattagtacgttttgatactcaaaaactacaagatccagaaattaatggaatagagtatcaacgaggaacgttgtatggatacgaaataaaagagtaccttcttgagaaatggggtaggaaatgtgtatattgtggtaaagagaatgtaccgttagaaatagaacatatcgtacctaaatctaaaggtggaagtgacaggataagtaaccttacattagcttgccacgaatgcaatcagaagaaaggtaatcaatcaattgaagaatttttaacaaataatccagaaaggctgaaacagatcaaatcagaatcaaagagaccactcaaagatacagcagcactcaatgctacacgttggtatatattcaatcaattacgaggaaacagcctcacggcaggtaaggaagaattacctattgaagttggaacaggaggacgaacaaagtacaatcgtgagacacaaaactatcctaaaaagcattggatagatgcagcttgtgttggagaaagtggtcaaaacgttcaaattgaacctgatatgcaagttttagagatcaaagcaatgggtcatggaatgcgtagaatgtgttttgtagataaatacggattcccaaaaaaatatcgtccaaaagaacgaacatatatgggatacaaaacaggcgatatagtgttggcagttataccaaaaggaaaaaatatgggtatccatattggacgcattgcaatacgacataggccaagctttttattaaatggtgttggtgatgtacatccaaaatatcttacattactacaaaaaaatgacggttatggatatcaaatatcttaa

SEQ ID NO: 1873 - DNA, 280 bp, Petrotoga mobilis
gtcaactacccccgtctaaagacggaggcttgaagcctcggagttgaccagcctaagttcgaagacagcctcacggcaaatttgaagaactacgttattctggtcatgacaccttggaatgctggagccagttccaagccctgtcgttcaacattaaacaggtatacggggttgaaaccagtgtgttgaatgtaaaaagccagaataacattggcgaggctcactttaacccgaaagggagaggaaggtaacttccatggaaaaggaatctgtacaacga

SEQ ID NO: 1874 - DNA, 1323 bp, Chlamydiae bacterium
atgcgagtgttagttatagacaaaaacaaaaaaccgctaatgccttgcaaaccatcaagagcaagagagcttttaagcaagggaaaagcggctgtcattagacgatacccattcacgattatactttttgctcgtgaggagggtgccatgcaagaaacggaactaaaagtggatcctggtagcagaatttcaggaatcgcattagttgctaaatttaaacagggacgaaaggtgatttgggcatcaaacctacatcatagaggacttgcagtgagaaatgctcttgattctagaagggcattgagaagaggaagacgatttcgtaacactcgttatcgaaagcctcggtttgataaccgaacaaggccgaaaggttggctccccccttccttgcagtctcgagtaggtaacgttcatcagtgggcaaaaaaacttcaacgttttgttccgatttcatctatcgctgtagaaactgtccgttttgatacacaaaaaatgcaaaatcctgaaatatctggcattcagtatcaacagggagtattacttggatacgaaattcgagaatatcttttagaaaagtgggggagaacctgtgcttattgcgatgctaaagatgtccgcctagaaatagatcacattgttccaaaaagccgtggaggagtgagcgctgtatccaacttaacaatctgttgccggccttgcaatgagaaaaaatccaatcaatctgtccaagagtttctgaagagtaaaccaggagttttatctaaatttcagaaaaagaaccgattatctctttgcgacacggcagcggttaatgcaacacgtattgccatagggaatgctttaaggactctagaattgccgataacattctggagcggaggaatgactaaatataatcgctttctccaaggataccaaaaagatcactggatagatgcagcttgtgttggagaaagcggagaaagcgttacactttccgaaatattctcgattttagaaatctcagctacaggaagaggttcacggcaaatgtgtagagttgaccgctacggctttccaagaacattagcaaaaagcaaaaagcgcgttaatggatttcagacaggagacagagtgcatgcatttgttcctaaaggaaagaaagccggaacacatattggaaaggtgtctgttcgatcgtctggaaattttaacatcaagacatcttcgcaaacggtccaaggtgtacatgcaagatactgtaagcgactattccaagcagacggttacgaatatgtacaatttataattaaaggaggcggcgtttcctcctcggtctaa

SEQ ID NO: 1875 - DNA, 269 bp, Chlamydiae bacterium
gtcaactaccctcccctaaaggggaaggcttgtatgagccttatgttgaccagccttagtttccacgaggaaactacgttaggagcgaatacataggcaccgtgggatgcttctccagtcccacgctctgcggtgagtggttaaacaggtgtaagaggttaagccagtgctgctcatatataaaccgctctataacattggcgaggagaccattacccgggaaaccggagattggcgggtaaccgcaaaaaggaaaaaagaacatgcga

SEQ ID NO: 1876 - DNA, 2229 bp, Unknown
  human gut metagenome genome assembly, contig: NODE_192_length_38345_cov_13.286210, whole genome shotgun sequence WGS
atgcgcggtcagcccttgatgccgtgctcgcctgcaaaggcgaggcatctgctcaaggctggaaaagccgtggtgaagcgtcgaacgccattcacgattcaacttcgaatcgccaccggtgaaacgaagcagaacgtgacgctgggcgttgatgcaggcgcaaagcatgtcggcctttccgctacgacggaaaaggaagaggtctttgcgtccgaagtcgaacttcgacaggacatcacggggcttctggctgcccggctctcgctgcgtcgtgagcgccgccagcgcaagacgcgctaccgtgcgccgcgctttttgaaccgtgtccgatcgaaacacaagggatggcttgcaccgtccgttgaaaaccgcattcaggcgcacatgtcgcgcatcgatgcggtctgcagactgcttcccgtcaccaagatcgtgattgagacggcatcgttcgacattcagaagatcaaggatccgtctgttgaaggcacggactatcagcagggcgatcagctcggcttttggaacgtgcgtgaatacgttctctttagagacggtcacgtttgccaacactgtcacggtcatgcgaaggacaagatcctcaacgtacaccacctcgaaagccgccaaaccggcggcgatgcgcccaacaacctgattacgctctgcgagaggtgccacaaggcctgtcacgcagggaagatcaagttgaaggtcaagcgcggccaatcgttcagggaggaagccttcataggcatcatgcgttggacattgctcgatcgcgtgcgcaaggcgcatcccggcttgcctgttgagaacacctgcggctatctgacgaagaacacgcgcatcaccctgggactccccaaagcgcattgcgtcgatgcctactgcattgcgggaaacctcaaggccgtacgaagaggcgtccacctctatcagcgacaggtgcgcaagcacaaccgtcagattcacaagtgtacggtgctctcgaagacgcttaaggacggcacgaagatcggataccgaaagctcaatcaaacaccgcatctggtcaagaacttcaggctcttcgacaaggtgagatgtcttgggcaaaccggcttcatcttcggccgaagatcgtccggttgcttcgatgtccggaggctggacggcgtaaagctttcttccgacatcagctacaggaagctcacgcttctcgaaaagagaggcacccatttaaccgaacttatcaaggaggacggcgcttcctcctctgtcagaagacagaggtttctgcgccgagtttctatgaacaagccgtgcacttatcttctttccgctctgatggcgtccgccgtgctggcgcctgtcgccgcttcggccgccgacaagtccgagctcgaggtccgcatggaggcggcgcagaaggtgctcgccgaccgctcctactacgagcgctggtcgcccgaggccgccctgaagacggttgaggatgcaaaggccgccaatgaggcgggttcggccaggcagaaggagatcgacggtgcgctcgacgtcatgaaggactggtgccacacgcgcttcctcgttaacgcctgcatcaaggacgcgagggacctgcatcacgagcgtgagaaggagatccgtagcgtacgcctcaaggccgacgagatgatccgcctcgaccgcgtcgagcagcgcagggcccgtcaggaaagccagaagcagaacgtgaagcagcccatgaagctcggcggctccaccgagtctcccgaaagccgcagcgagtcgcgcgccgaggaggtgaagaccaagcagagccgcgccgaggagcgcagggcccttgaggaggcgaacgtccgtgcctacgaggaaaagcaggcgagggccgccagaaaggcggaggagcgccacgatcccatcagggtgaagagccgcgtgaaggctccgtcaagtcccattgaaggacatctcggccgtacggcggctgacgttgaggcgggcagggccgaggcggccgagcgcatggctcaggaggacgccaacattgcggccttcaatgccaagcaggccgaggcgaagaagcgccttgaggaggccgaggccaccgccgccgaacgcaaggcgagccgcgaggcgcggcaggcgaacttcaacaagacgctcgaggagcgtcgcgccgcacagaagcgctatgaggagtccagggagaacaaggactccggcctcaagaagtatttctga

SEQ ID NO: 1877 - DNA, 276 bp, Unknown
  human gut metagenome genome assembly, contig: NODE_192_length_38345_cov_13.286210, whole genome shotgun sequence WGS
gtcaataacccctgtctgaagacagaggcttgaaagagtctttattgactagcctcagcgcccctctttcgagaggcgctacgttggttgggaatgtataggcaccgtgggatgtacatcctagttccacgctctgcggcctgtgattaaaagctctgagaggtaggagcggtgttgcaggcaccaaaccccttccaacattggcgaaggatgtcaaccggccttcgggccgtgtaagcggaacctgcgggtatccgcaaaggagatactttgaaa

SEQ ID NO: 1878 - DNA, 639 bp, Unknown
  Ga0326513_10003181 JGI
ctgagaacagatttagttgaaaatttatcaacccgaagggaaacgagacgaacccgacgttcaaggaaattacgatatagaaaagcaagattttcgaatcggaaacgtacggaaaaatggctgcctccgtcaataaaatcaaaactggaatgccatttaacactcatagcaaaactgcacaggtttttgccgataggaaaaatcgttgtcgaggttgcgagtttcgatattcagaaaataaaaaatcctgagataaaaggagctgaatatcagcagggtgttcaatcagacttttggaatgtacgtgaatacgttttgtatagagataatcataaatgcagatattgcaaaggtaaatcaaaagacagggttttaaatgttcatcatcttgaatcacgaaaaaccggcggcaactcgcctgacaatttaattaccttatgcgaaacctgccataacatgtatcaccggggtttaataagtctggataatgtaactaaaggcagttcctatagacccgaaacatttatgagcatactgaggaaatatctgattgaaaacctcaggaaaacatataacaatgtaagttatacctatggttatgaaactaaaagtaaaagaattgcaaacaggctggagaaa

SEQ ID NO: 1879 - DNA, 271 bp, Unknown
  Ga0326513_10003181 JGI
taattatggcttttgcttagtctaagtgatttcgctgaaaagtgaatgaactacgttatgagagaatgaatttatgcaaataaattcaaatagttaccttcggatgttcatctagtctgaagctctaaggtgtatgattaaacagtcggtaatgctgacagtgttgtacacggcaaacctctcaataacattgacgaaggtgcatttacggttttgcagagttccggctgttaacagcataaactgcagctcataaagggatttttgtatg

SEQ ID NO: 1880 - DNA, 1254 bp, Unknown
  Ga0326511_10001255 JGI
atgcgcggtaaggcattaatgccaactagtaatagaaaagcacgtatactgttaaaacaaggtaaagctaagattgtatgttataatccatttacaattcagcttaaatatccaacaggtgaaacgacacagccgactgaattagggatagaacccaattataatgatttaggcatagctgttgtttcacaggaaaaagtacttcacaaatgtgagatacattttcttccaggaatgcatactaatctaaaatcaagaggtgctttgagatcagcacgacgtgcacgtaaaacacgttatcgtaagcatcgttgttcaaatcgtgcaagtcgttataacgctatgtcaccaagtagtcggaataagctaagacattatataaactggataaacaagtttaaagcattgttaccgaactgcacagtgtacattgtttgtgctgatccagcagaacagataatatctgagtctaatgatgcaacaacacaaactaacaaaaaaccatttcgtaatatacgaatgcgtgtttttgaacgtgacggttacagatgtcagatttgtggtagaactggtgtaaagcttagcttacatcacatacggtttagaagtaagaatggtagaaatgatttagataatctgatcacagtgtgtgatgattgtcattctcatgaaaatcatttaccgggaggtattttagacaatttacgacaacagaaacgtgtcagcaagtctaaatcggcaattaccgactatccgttatctcgaaaagtacatgcacagcttaaacgagcatttcctgatattgtaagtgtagctaataatgatgtactaaatagatgcacaacattaggattaacacctactgtgtataataaagcaattgcagcaacaggtataaaccagcttaaacaagacacaaatgacatattacaaatcagacagtatcgaacaaaagatagaagcatacataattctgttccaataaaaggtagaaaagaaccaaacagaaatgcaacacgtcgtaatacaaacatacgtacataccgaggatgggttaagaatgataaagttcgtgtgttcggtactaaggttggttttataacaggatttggtaattttgttgcttgtgttaaggatatcaatggtaattacataacagacccaaatagaaagaactactcagtcaatttaagtagtttaaaattaatgtgtcacaataataattggcagtatcagacagtacaatgtgagtaa

SEQ ID NO: 1881 - DNA, 317 bp, Unknown
  Ga0326511_10001255 JGI
gtcacggtacttataataataatagtacacacaaaatcgatgcactcatggaatatacatttcaaactgtgaataacagttacatcgattactctaagttctctgagaactacgttatttatgttatcatacatacggatgattctctagtctgtattcttatgtaggctctgtaaacagttctgttgagtaggaacagtcaacctaaggtggtcgagtacgacaagcatttataacatggaggaagggaaccaaactttcacagaaaggtataccacttgcgtagtaggtatttaattatgaaatcagaaaacaga

SEQ ID NO: 1882 - DNA, 1314 bp, Unknown
  Ga0265293_10014478 JGI
atggtttatgtaatttcaaaagaagggaagcctttaatgccaactaaaaggcatggaaaaattagaattttacttaaaaatagtcaagcaaaggttgttaaaagaaaccctttcactattaagcttttgtatgataccacaaattatactcaacctgtaactttgggcgttgatagtggctatacttatattgggttttcagcaacaactgaaaaagaagaactgatttcaggagaatgtactttattaaaaggtcaatccgagagactgaaagaaaaatctatgtatagaaaacaaaggcgaagtagactaaggtatcgtgctccacgctttgataatagagcaattcccaaaggttggctagcaccatccattcaacataagtatgaatctcatcttagatttatcgcctatttacaatctatattgccaatttcaaaaatcatcatagaagtagcgaattttgatgttcaaaaaattaaaaatcctaaaattgagggaaaagaatatcaagaaggtgaacaaaaagacttttggaacttgaaagaatacattttgcatcgagataatcacaaatgtcagaatccagattgcaataacaagtcaaaagataagatattggaagtacaccacattggtttttggaaaaaagatagaaccaatagaccaagtaatttaattactctttgcgataagtgccacaatccaaagaatcacaaagagggtaactttctttggggttggaagcctaaattaaagagttttaaagaagctacctttatgtcagtagttcgttggaagcttgtgaatagcttaaattgcgaacatgcttatggtttcgacacaaaatcaaaaagaattgctttgggtttagaaaaaactcattttaatgatgctttttgcataacaaatggctctactcaaaaaagagtaaaaccaatctattttgaacaaatccgcagaaacaataggtctttagaaaagttttatgatgccaaatatatagattcaagaacaaaccaaaaagtaagtgggcaagacctttttagtggtcgtagagcacgaaacaaaaatctaaattcagagaatcttcataaatatcgaaagcaaaaactatcaaaaggtcaaagaagaataagaactcaaagatacttttatcaaccaaaagatttggttaaatatgaaaacaaaatctatacggttaaaggaattcaaaataagggagcttatattaaattagaaaatttatctaagccaattaaaactgaattagtagttccatatgagtttaggaaaggcatttgcgtgatttaa

SEQ ID NO: 1883 - DNA, 299 bp, Unknown
  Ga0265293_10014478 JGI
gtcaacgacccaccacttagcaccgtaggtgcttgaagtgggggcttgagaaaggctctgccttttgaaaagcctagttgaatagcctaagttcttcaagaactacattatgtgggaatatatagttaccctagaatgctccactagttctaggctctaaggtgtaggattaaacatctctaaagggtaggagaagtgttctacatttgaaaccccatataatattggcgaagtggacttaccactactttttattcttaaagtagtgtgaattactctatagggagttgaaatcaatg

SEQ ID NO: 1884 - DNA, 1269 bp, Unknown
  Ga0265298_10029446 JGI
atggtagtgtatgtgctagacaagagcggaaagccgctgatgccgaccgataggacggcgtgggtggcctatgccttgaagcacggagaagcgaaggttgtgaggcgagagcctttcaccattcagttgctccgcgatagcacgaactatctccaagcggtaacgcttggtgttgatgtgggaagcaagcacatcgggctttctgcaacaaccgaaaagaaggaactgtattccgcacaggtggagttacgggacgatgtgactaaacttctgttggctcgcagggagtttaggagaggaaggcgagggcggaaacacaactggtacagacctgcgaggtgggctaacagagcgaacgaaaagcgcaatgcggcattgccgccaagcataataaacaaggcggacgcacacttccgcgccgtgcagttcgtgtacaaactacttcccatcagcaagacacgggttgagttgggcaagttcgacgttcagaagataaagaatccgagcatcgaaggagagaagtaccaacaaggtgtgcttgcgggctgggagaacctgaaagcctatgcaaagtaccgtgatggttacaagtgccgtgcttgtggcaagagcaagcacaaagacggagtaaagttggaagtccaccacataatccgcagggctgacggtgggactgatgttcctgagaatgtggtgacattgtgccacgagtgtcacgagaagaaccaccaaggtgagaaaaagttgagattgaggcgtccaccacagcacaaaggcgaagcgcatatgaatgctatgcgatactatttgttagatacgcttctccatacgaacaggaagatagagaggacctatggctacaagacggcgacggctcgtcgcgaacacggcatagagaagagccatgtgtcagatgcgtactgcatagcggggaacttcaaggcggagcgaagcaacgataatgtgtatctgcacaagtttgttcgccgccacaataggcagttgcataagacgaccatcttgaagggtggctgtcgcaaggcgaatcaagccccgaagtatgtgtttgggttccgcctgtttgatggtgttcgctattgcggtcaaaattgcttcgtgttcggtaggaggagcagcggttcgtttgacatacgaacactggaagggaagaagatttcggcgggggtgtcgtacaagagactcaagccattgactaaatcgacaacaatattaactgaaaggaggatgtgcgattcctcccaaccctaa

SEQ ID NO: 1885 - DNA, 303 bp, Unknown
  Ga0265298_10029446 JGI
gtcaactacccaaccctgaatggttgggcttgtgaggggaaccgagcaagcccgggttgactaggggactgaaacggaaaggaaactagaagtggaagtagcagttaggagagaatgcataggcaccctcggatgtgagtccaagtccgtggctctgcggtgtgcggttaaacagtcctacgaggtaggggcagtgccgcacacgataaacctctcccaacgccccgatgggcacctaacacagggaggagaaatctaacctgtgacttaccgagaagtcggttaaaggaaactaagatggta

SEQ ID NO: 1886 - DNA, 543 bp, Unknown
  Ga0335394_10082827 JGI
gtgtggggcgcagagttgacccatcgtggtcagagtattcgggacgccctcttgagtcggcgtcagcagaggcgattccgtcgtcagcgccagacgcgctatcgtgcggcgcgtttcaacaaccggcggcgtgttgcgggatggttggctccgtcgttgcaaagtcgtgtggagaacatctggacatgggtggtgcggttggcgtggcgctgccctatcacatcgatctctcaggaacttgtgaggttcgatatgcagttgatggagaacgctgaaatctctggcgttgagtaccagcaaggcgcgttgcagggctacgaagtgcgcgagtatctcttggagaagtggggccgccagtgtgcctattgtggcgcaaaagacctgccgctagagattgagcacatcattcccaagacacgcggtggttccaaccgtgtgaccaatctgtctctggcgtgccacgattgcaaccagaagaaaggcacacagaccgccgcagagttcggccatcctgacattcagaagcaagccaaagcgcccttg

SEQ ID NO: 1887 - DNA, 252 bp, Unknown
  Ga0335394_10082827 JGI
gtaagcatccccacacctaaaggtgggggcttttagccccaatgcttaccagacttagcctgagaaggctgcgttagagacgaatacagaggcacttcggaatgcctcaccagttccgaactctgcggtgaacgattaaacagggggcttgggagccaacagtgttgttcacacaaaaccgtctcataactttgtcgaggtgaactttatccgcgcaagcggaaatatgaaaggtaactttcaatgcaacgt

SEQ ID NO: 1888 - DNA, 702 bp, Unknown
  Ga0209720_1016953 JGI
atgttagtatacgttttaaataagcatggtaagcctttaatgccttgcaaaccatcaaaagccagaaaacttttaaagcaaggcaaagcaaaaataacacaaagagaaccattcacaattcaacttatttatggtagtagtggatacaaacaacctattgcattaggtatagatgctggaagcaaatttatcggagtgtctgctacaacagaaacgcaagaactattttcggcagaagtagaactaagaaacgatatagtacaattattatcagaacgtaggcaatatcgtataagtaggagatatagaaaaacaagatatagaaaaccacgatttttaaatagagtacgaagtaaaaataaaggttggttagcaccttctgttgaaaataaaatacaaacacatttaaaaataatagaaaaagttcataagatattgcctataactaaaataattatagaagtagcttctttcgatatgcaaaagattaaaaatcctaatatagaaggcgtagaatatcaacaaggtgaacagttaggattttggaatgtaagagaatatgttctttggagagacaatcatacttgtcaaatttgtaaaggtaagagcaaagacaacaggttaaatgttcatcatatagaaagtaggcaaacaggtggaaatgcacctaacaacctcataactttgtgtgaggtctgccac

SEQ ID NO: 1889 - DNA, 236 bp, Unknown
  Ga0209720_1016953 JGI
gtcaactaccccaacctatagaggttggagcttgtaaaagctcaagttgactaccctaagtccttcgaggactacgttatatatgtcataacacctacgggcgtttctcctaactcgtagctctgttgcttaactttaaacaatcctgtgaggtagggatagtgagttaagtgtaaaaagcctatataacattggggaaggagacattactccaaaaggaggtatactttatgtta

SEQ ID NO: 1890 - DNA, 1419 bp, Unknown
  JGI12150J12686_102082 JGI
atgcagaagttacgcggaagaaatacatacacccccacgagtgctgctcaagcttgcggctctgtggcaggatggttaaacagttctgagagggtaggaacagtgcggtccagcttaaaaactccgcataacaactccgatgagcacttactccaaccagcgggagggcataaagccgatacgctggtatatgtgattaataagaacggaagaccattaatgccgtgtaaacctgcaaaagcgagacatctgctggaagcaggtaaagcagaagttgttcagcggacaccatttaccatacgccttctttgggattgtgaagaaatcacacagaacatcaccctcggcattgacgcagggtacacaacaatcggtttcagtgctgtaaccacagataaagaactaatcgcgggagaactcgaactccgcaacgatgtcaaaagactgcttgagaagcggaaagcatacaggcgcacgcgaagaagccgtaagtggtacagaaaaccgcgattcaacaaccgtggaaagaaaggttggcttgcaccgagcatcaaacacaaactcaatagccatatcaagcttatcgaaaaactgaagaaaatcctaccgatcacgcgaatcatcgtagaggttgcttctttcgacacacagaagatgcagaacccggaaatctctaacatcgaatatcagcaaggtgaactgcagggatatgaggtcagagaatacctgctcgaaaagtggggtaggaaatgcgcttactgcagcaaaaagtacgttccactggagatagagcacatcgtaccgcggtcgagaggtggttcggatcgagtctccaatctcacgatagcatgtcacgagtgcaaccagacagcagaggagttcggacacccgcagatacaggctaaagcagagaagtccttgaaagcaactgcgtttatgaatatcgtgagaaatagaatcgttgatatactgggttgcgatcagacttatggctatatcacgaaacatgaccgcatagaactctatctgaagaaatcacacgcgaatgatgcttttgtgatcgctgacggaaatgatcaggaacgcgctaaccacattcacatcggtaagcaggtaagacgacagaaccgatcattgtttaaagctaacttcttcaaaggaggaaagttaaaaagaaacactgtgaaagaagttaaaggattcaggaggtttgataaagtgaaatacgacgacaaagaatgttttatacacggactgcggagttccgggtacttcgatcttcggacaatcactggagatcgaatcggaacgtctgtgaacagcaagaagctaacgcttctggaacgagcgagaggaattatacaggagatgtgcgcaattcctccccgcgcttgcggacggggtctccttgcacggtga

SEQ ID NO: 1891 - DNA, 255 bp, Unknown
  JGI12150J12686_102082 JGI
ccccttgaccctaacgggaccgaggaatgggctttttaagccccttagttgatcaggaggcatagaaatatgcagaagttacgcggaagaaatacatacacccccacgagtgctgctcaagcttgcggctctgtggcaggatggttaaacagttctgagagggtaggaacagtgcggtccagcttaaaaactccgcataacaactccgatgagcacttactccaaccagcgggagggcataaagccgatacgctg

SEQ ID NO: 1892 - DNA, 1320 bp, Unknown
  Ga0137378_10002753 JGI
atgtcacacgtgtttctggtggacgcccacaagcgcccacttgctccggtacatccggggcgagcacggctcttgctcaaggccggcagggcggcggtcttcaagcgattccccttcaccctcctgctcaaagagcccggagcgcaagccgccggcgagccgctccgtttgaagatcgacccgggaagtcgcaccacgggtctggcgctggtaggagagacgagtggcgaggtggtgtgggcgggggagctcacccatcaaggagagacgatcgtggagcgcttgcgcaaacggcgagccgtgcgccgaggacgcaggcagcggcatacgcgctaccgacaagcgcgcttcgcgaaccgatgcaggtcggaaggctggctcccgccttcccagaggagccgcgtgcaaaacgtggtgacctgggtcgaacggctgcgcaggctgtgtcccatcacggcgctctctgtggagttggtgcgctttgatacgcaagccatgcaggcaccgggcatcgagggcatccagtaccagcaggggacgctggcgggctacgagaccagggaatatgtgctggagaagtgggggcacagatgcgcctattgtgatgcgacgggcgtgcctctggaggtggaacacattcgacccaggagccgtggggggagcagccgcgagagtaatctgacgctctcctgtgtgccgtgtaaccaggccaaggggacgcaggacatccgcgtgtttctggcacatgatccccagcggctcgtgcacattctggcacaggcgaaggcctcgctgcgggatgtggcagtggtcaatgcgacccgctgggcgctctatgaacggttggcagccttcgggctccccgtagagggggggagtggcgggcgcaccaaatacaaccgcagccgccagggcattccgaagacccattggacggatgccgcctgcgtgggcgccagcacccccgaggagttgcggaactggcagaccgtgcgacccttgctgattactgccaccggcaggcaatgccgtcagatgtgcaacatgaataagcgaggctttccgcgtggcaagccaaaggggccgagccgatcacacgggttccgcagcggggatatgttgcgggccgtagtcacgaaaggcgtgcacctgggcacctacgtgggacgtgtggccatcaagtccgatggctactttaaactcacgaccggggccagggtggtggaaggcatccatgcccgctattgcaccccactccatcgtggcgatggctatgggtacgcatgtgggagtccggcagcgcttcctccccaggcctga

SEQ ID NO: 1893 - DNA, 315 bp, Unknown
  Ga0137378_10002753 JGI
gtcagcgaccccacggggaaacccgggggcatgttcttgagaaagggtgtgccctgatgctgaccagcccccctgagtgctcttgaggagagagcggccagggaaccgttcgttgggagcgccaaaagtcggaccctgagatggcctttccagtcccaggcgcttcaatcccgctgttaaacaggtgcacggggaagcagagccggtgcagcgggaagacggccgccaacgaaccagggcgaggaaaacatgacccgcgcaagcggaggccccaagcggggcagacaacgaaaggaagcagtaggtatgtcacac

SEQ ID NO: 1894 - DNA, 1296 bp, Unknown
  SMTZ23_10055571 JGI
atggtttttgttctgagcaaaaccaaaaaaccactaatgccctgccatccagcaagggcacgagaactgctcaagaaaggtcgagcggttgtccacaaggtctatcccttcacgatccgtctcaaggatagggtcgagggggacgtacaaccgatcagggagaaggtagaccccggcgctaagacaacgggtattgctctcgaatcagaagggaagagagttcttttctttgcagagcttaaccacaaaactacgattcatgacaacatgagaaaacgagccaattaccggggtagacgaagaagtgcaaacctcaggtaccgagcaccaagattcaacaatcgcacacggccaaatggatggttgccaccgagtctccaatcaagggttgatgctattacgtcatggactgtgcggttcaagaaactatgcccggtcaccgattgctcggttgagaccgtacgatttgatacgcagaagctccaaaatcctgagatcaatggtgtcgagtaccaacagggagaactattcggatatgaagtgcgggaatacctgttggagaaatggggtcgaaaatgtgcctactgcgggaaagaaaatgtacccctggagatagagcatatcattccgaagtcgaggggtggtacaagtcgagtatcgaacctaacccttgcgtgttacacgtgtaacgagaagaaaggtaataagaccgcagcggaatttgggtatccagaagtccaaaagaaagccaaggttcccctgaaacaggcagctattgtcaatgcaacacgaaatgctctctacagggaactgagtaaactgttcataaaatgggttgaggtatctacaggaggccgaacgaagtacaacaggacaaggctcggattgcccaagacccactacttcgatgctctatgtgttggtaaatcaacaccaacgcagcccggtagtttcaggaacatagattcaacgccggtgctatcaatcacctgtaagggcaagggacaatatcgaagaacgaatgtgaataaatatggttttccgagactatatctcatgcggcagaagatggtcaacggattccagacgggggatatggtgaaaacagtcataccaaaaggaaaatattctggcaggtatcgaggagtcttggccgttaggaaaaccgggtacttcggtttgtatcgtaataagaaattggttgctgagggagtcaaagctcccaataccctattggttcaaagattcgatgggtacacatactctttacagagtcccgattcctcccccacttaa

SEQ ID NO: 1895 - DNA, 306 bp, Unknown
  SMTZ23_10055571 JGI
gtcaatgacccccacttaaaagtgggggcttgctctacggggcaagcctcaaattgaccagcgctcagcaccggagccaacgacacggctacgatggtgctacgttagtataaggtacaagacccactccgggatgcttcctcagtcccggacactggaagtttcagcagcagacaaagttaggggtcgtacacgaaacgggctgaaacgatacgccgtatactaacattgccgaggggagatttcaggaaatgtcgatcctgaaacgttaccggcgaaagccgagaaaccaggaggtaaacaatg

SEQ ID NO: 1896 - DNA, 1356 bp, Unknown
  human gut metagenome genome assembly, contig: NODE_117_length_59318_cov_12.435854, whole genome shotgun sequence WGS
atgtcagttgcagtcattagtaaaacaggcgaaagattgatgccaacaagtgaatacagagcacgtaagctgctcaaatcaggtaaagcaataaaatatagttatcatccgtttaccatacagctcactgaaagaaaaactggaaatattcagccaatagagctttgtatggatacgggatatatacatattggaatatctgtaaagtcagagaagcacgaatatctgacagaacagattgacacattaacagacgaaagaagcaggcataatgcacgccgtatgtataggagccagagacgaaacagaaaaagataccgccagccgcgcttcaacaatagaaagaaagataaaggctggattgccccgtctttggaacacaaaaagaatatacacgttcaggcaatttcacgcatcaacaatgtcatgcctcttacagatattactatggaaatgggaaattttgacactcaggtattaaaagctaaagaggaaggaagaccattaccgcaaggtgtagattatcaacacggtgaacgctacagtatcgcaacgcttcgtgaagcagtttttgcccgtgatggttataaatgtcaatgctgcggcagaacaataaaagatggagcgatactccatgttcatcatattaaatacagaagccagggcggaactaatagtatatcaaatctggctacagtatgtgataaatgtcatacaccgaagaaccataaaccaggtgggaaactatatggctggaagccaaaacttccatcatttaaaggtgcaactttcatgaccacgatacgatggcagctttacaacgaggctaaggctttattccctgatattgatattcacattacatacggagcagcaacaaaagaacggcgccgagagctgaatatcgataaatcacatatcaatgatgcgtttgttatggggcagtttcatccgagacaccgtataaaagcggttctttataagaaaaaacgaaggaataacagatgtcttgagaagttctatgatgcgaagtatattgacagccgcgacggaaagaaacgaagcggtcaggaattatttaacggtaggattaatcgtaatcataagaaggattctgaaaatctgcatcagtatcggttacaaaaagtaaccgcaggaaaaagaactgttaggaaacaacattacagtgtccagcctcacgatatcatcatatacgaaagcagaaagcgtgaaactacaggatgccactgtaatggagcacgggtgatgctactccctgataaaaaatctgtatctattaaaaaaatcaaaatatacagatatgctggcggttattttaaatcaacatttaattaa

SEQ ID NO: 1897 - DNA, 526 bp, Unknown
  human gut metagenome genome assembly, contig: NODE_117_length_59318_cov_12.435854, whole genome shotgun sequence WGS
gtcaataacccgcgcccgaggtaaacctcggacggggcttgcaaaagaataagttttcttatttccacttttgtttagccccgttacagtttacggaaggctgttggctgtaaagccttattgatagcgccggggtcacccgtcgttaccacataaggcttacagccttattgattagccttggtagtaaagaagccggccaaaccaggtcaggtaaatctttaactgctacgttaccggtaaaataggcaccgtgggatgctcctcaagtctcacgctctgcggtatgctgttaaacatctcttagggtaggagaagtgcagtatacgctaaactatcggataacattggcgatgaggacaaccgattctgactaggcgccggcttgccggagccgaaaagatagagaacctgtatggactgcttttaaatatcttcggatgtttggaagcggttggtgcagaagacgtaagtcatcccggcttgccgggaaaatataagaataaaaggagggcagcttatgtca

SEQ ID NO: 1898 - DNA, 1362 bp, Unknown
  human gut metagenome genome assembly, contig: NODE_3680_length_4513_cov_6.120682, whole genome shotgun sequence WGS
gtgccgccggcaacaaaccccttccaacattggcgaaggatcttaaccggtcgaaagaccgaggtaacaaacttgagagtatttgttttaaacaaacgcggaaagccgctgatgccgtgttcaccggcaaaggcccgcattctgctcaaagagaaaaaagccgtggtgacaaggcgcatgcctttcactatccggttgacaatcgccaccggcgaaaccaagcagccggtgacgctcggcgttgatgccggatacaaacacgttgggctttcagcttgtactgaaaaggctgagctgtatgcatctgaagttgaactccgacaggacatcacggagctgctctctgcgcgcttggcgctgcgtcgcgctcgccgaaaccgccagacgcgttatcgcgccccacgctttgacaatcgcgttcgcagcaaacacaaaggttggcttgctccttcggtcgagaaccgtatcaacgcgcatctttcacgcattgacgcagtacttcgcattttgccgatttcaaaaatagtcatcgaaacggcagcctttgatacgcagcttttaaaggataccaacattgaaggcgcaacctatcaacaaggcgaacagtttggtttttggaatgtacgcgaatacgtgctctttcgagacgggcacgtttgtcagcattgtcacggcaagtccaaagaccctgtactcaatgttcatcatctggagagtagacgtacaggaggcgatgcgccgaacaatctgatcacgctatgcgaaacgtgccacaaagcgctgcatcaaggcaaacttacgctcaaagtaaagcgagggttcacttataaggccgagacctttatgggaattatgcgatggacggtgcaggatcggctcaagacagcctatcccgacattgagattcgcaacacctacggctatctcaccaagcattcgcgtatttcacatgggattgccaagtcccattgcgccgatgcgtattgcatcgccggtcatcttaaggcaaaacgtctggccggttattactatcaaaagcaaacccgtcgacacaatcggcagatccataagctgacgattctgaagggtggcttgagaaagagaaatcaggcagcttacgaaatcaaaggctttcggctttttgacaaagtgaaggttcttggagaagaaggcttcatattcggtcgaagggcttcttactttgatgttcgcaagcttgacggaacacgtatttcagcgggcatcagtagcaaaaagctgactctgctggaaaaacgcaaaacctatttaacagaatacagaaaggaggcggcacttcctcctctgaatgaattcagaggtttccgcgccgatgttctatga

SEQ ID NO: 1899 - DNA, 259 bp, Unknown
  human gut metagenome genome assembly, contig: NODE_3680_length_4513_cov_6.120682, whole genome shotgun sequence WGS
gtcaactagccataccccgctctaaagagcgaggctggataaaagccttggttgactagccttggtgatcttccttttgagaggtgaactccgttggttgggaatgtataggcaccgcgcaatgtcgttcctagttgcgcgctctgcggtcggtggttaaaagttctgagaggtaggagccgtgccgccggcaacaaaccccttccaacattggcgaaggatcttaaccggtcgaaagaccgaggtaacaaacttgaga

SEQ ID NO: 1900 - DNA, 1344 bp, Unknown
  human gut metagenome genome assembly, contig: NODE_128_length_79994_cov_7.882986, whole genome shotgun sequence WGS
atgatggtatatgtcttagatgtaaacggccagccactgatgccaacagaaagatgtggctatgtacgcaaaccgctgaagagcaataaagctcaagtcgtaagtggcaatccgtttacaatccaattgctttatgagacggaaaacaatacacaagacattgatctgaaaatcgatgctggttatcagcatattggcatttctgcttgtactgataacaaagaattgttttccggtgaattaaagcttttagaaaaccaatccaaacgattagacgaccggcgagcatatcgtcgcacgcgtcgcaatcgtttgagatatcgcaagccaagatttgataatcgcagaagaccggatcaatggttggcacccagcattcagcataagctggacagccacaaaaaggtcattcgaaagttgatgtgccttcttccgattacaaaaatctatgtggaaacagcaaatttcgatattcaagcattaaagaaaccaagcatatccggtgagaaatatcaaaagggaaaaatgtacgacttccgaaatttgcgtgagtacactttctacagagacggatacacttgccagatctgtggtaaaaatgctttccgagatggtgcagtgcttcgcatgcatcatatcggatattggaaaaacgatcattcaaatacgcctgcaaatacattaacgctatgtagcaagtgtcatacgtcacgtaatcatcaaaagaggcagattttgtatggtctgcaaccaaagcaaaagtctttcaaaccggagacatttatgtctacggtcagacgaatgctaatcactcagctgcgtgatgaatacacaattccggttgtagagacgtttggctatttgacaaaatccaaacggatagatttgcagctggacaaaacacattacaacgatgcgtattgtatcggcgacaaacagccaaagcaccggtgtaaaccggtgttctggcaagagaagcgtaagaataatcgttgtcttgtaaagttctacgatgccaaatatgtggatgcaaggacgggtcaaaaggctaccggtaaagaattatttaacggtcgaacaactcgcaacaaaaacctgaatggtgagaacttgcatccatacagacagcaaaagatttccaaaggcaggatgtctgtcagaagacaacgatatccgtaccaaccgcatgatacggtgctttggcgtaacagaacatttgaagtggttggcgcacaaaaccgtggcgcttacgtatctatcaaaaataacgatttcaaaaaagttgtaagtaccaagcgattacagccattcaaatacgcgaaaacagtttataatacagcatag

SEQ ID NO: 1901 - DNA, 326 bp, Unknown
  human gut metagenome genome assembly, contig: NODE_128_length_79994_cov_7.882986, whole genome shotgun sequence WGS
gtcaattaccccagactgaccgtaaaacagtcagtcggggcttgtgagtaattacaagtccatagttgattagtctaagcacttcgagtgctacgttatgttttaatggcagcttcggctgccaaataggtaccaaggggtgctccacaagccccttgcactacggtgtattgttaaaaatctttgatggggtcgaagacgtgcagtacacaacaaacaattcataacattgacgatgtgggtttaccacagaccgggcctttggctccgtctgcgcgctggtcattccagaccaaatttattgaaaggagccatatcttatgatg

SEQ ID NO: 1902 - DNA, 759 bp, Unknown
  human gut metagenome genome assembly, contig: NODE_1355_length_19542_cov_13.053583, whole genome shotgun sequence WGS
atgccctgttcaccggcaaaagcgcgccttctgcttaaagagaagaaagctattgtgaagaggcgaacgcctttcactattcagctgacgattgcaacgggtgagtccaaacagccggtgactctgggtgttgatgccgggtacaaacatgtcggcctttccgcatcaacggaaaaggctgagctttatgcatcagaagtcgaactccgtcaggacgtctctgatctgctctctgctcgtcgtgcgttacggcagtcccgccgtaaccgcaaaacgcgctaccgcgcgccgagattcaacaaccgtctccgcaccaagcgcaaaggctggcttgctccgtcggttgaaaaccgaatcaacgcgcacttgtcgcgcatagaagcggttcttcgactgctgccggtcacaaagatcaccgtggaaacggcgtctttcgacttgcagctgctgaagaatcccgacatttcagggaaagaataccaggagggagaacagctcgacttctggaacatccgcgagtatgttctttgcagagacgggcatgtttgccagcattgttacggcagatcaaaagacccggtgcttaatgttcatcatttggaaagcagacgtacgggcggagattcacccggcaacctgattacgctctgtgagacgtgccataaggcccttcatcgcagtgaaatcacgctgaaggcaaagcgcggacaatcgttccgcgctttgccttcatgggaattatgcgctggaaggtgctga

SEQ ID NO: 1903 - DNA, 247 bp, Unknown
  human gut metagenome genome assembly, contig: NODE_1355_length_19542_cov_13.053583, whole genome shotgun sequence WGS
gtcaactacctcggcctaaaggccgcggcttgaaaaagcctctagttgactagcctcaggccgtcatttggcggactatgttggtcgggattttataggcaccgcgggatgcagatcctagtcccgcgctctgcggccgatggttaaaagctctgagaggtaggagcggtgctgtcggcttgaaaccccttccaacattggcgaaggatcacaaccggtcgaaagaccgaggagataaaacttgaga

SEQ ID NO: 1904 - DNA, 675 bp, Marinitoga sp. 38H-ov
atgaaaagaaaggagtacagaagaacaagaagataccgcaaaagaagatatagaaaaccacggtttctaaatagacgcaggcgtgaagattggcttgctccaaatatacaatggaaagttaatgcacatataaaaattattaacttcatagcaaagatactaccagtcaaaaaagttgtggttgaaatagcaccgtttgatacacacaaaatagttaatcctgatgttaaaggtaaagaatatcaagaaggtcagcaaaaaggtttttgggatgttagagagtactgtttgtggcgtgcaggatacaaatctgagacatcaggtaaaaaaggtatattggaagtacatcacgtcataccaagaagccaaggcggaactgataatccttccaatttaatagttttaactgcagaagaccacaaagctattcatgaagataaacttaaaatttcaagtatcagacttaagaaaattaaaatcctaaaagatgcgagtcatgtttcaacaatagtctggttcattgtgaaccacttaaaacaaaaatatgatgttggtataacatatggtagtgctacaaaatctaaaagaatagaaataggattggagaaaacacataggaacgatgcttttgtcatttctggaggaaataattttattaaaaaattagaccgttga

SEQ ID NO: 1905 - DNA, 254 bp, Marinitoga sp. 38H-ov
gtcaattaccgccaacctatagaggtggtggcttgtaaaagccatagttgactaccctcagccaggggaagttaatcttcctatcgggctacgttagtctggtcataacaccctgggatgctgctcaagttccaggctctgttgtctgtcattaaacaatcctgagtggtagggatagtgcggcagacatggcaagccagtctaacattggggatgagcacctaactccaaataaatgaggcttacctcatatg

SEQ ID NO: 1906 - DNA, 1233 bp, Unknown
  JGI25616J43925_10007359
atgatgtgtgtgtatgtacgtaatcacgatggggcggctctcatgccttgcacaccagccaaagcacggaaattgttacgagcaggcagagcgaaggtcgtagcctaccgaccctttaccattcaacttacctggcagtgcgaggggaaggtccaggagatcacctgtgggattgataagggcagcagcattacaggcgtagcttgtgtaggcaatggcaccgtgttgctcgcagcagagatccatcatcgtcgcgatgtcaaagacaaaatggaggatcggcgtgaccgacgcaagagtcgtcgagcacgcctctggtatcgcccggcccgctttctcaatcgtgcgtcgagtaagcgcagtgggcgcttgccgccctcgatcaaaaccaacgtcgaagaggtgatccgggtcgtccggcagctccccttacccatcagcgccctggtgattgaggatgtccaggtggacatcgcaagactcaacaaccccaccttacaggggccacagtatcaagacccgacgcggctggatgagaatctgcgcattgcctgtctgatgcgcgacgggtatgcctgccagcactgcgggaaacgggggacgcgtctggaggcccaccacctgatctttcgtcaaaacggaggcaaggatacgcttgccaatttgctgaccttgtgtgagggctgtcaccaccggctgcacgaaggaaaaattaccctgaaggcgacgggagtgggcgggcacctggatcagatagcccaacgcactatgcaaggaaaaacccatctctatgcagcactgagcgcgttcgcacctctgacaaccgtgtttggctatgaaacatctgcataccggaaatatcgtaatttgccgaaaacccatatcattgatgcactgtgtattgccacgcttacgaccggcgaagtggttgctccgccagagcgcaatatctaccacatcagctttcgccccaggcaaacgcgcaagcggtatcacagcttgccgcagaaagggaaaggccgcgtgaaatatcaggtcaatggcgaactgcaaggctttcgcaaaggcgatttggtgctggtcaaggagaagtatatgaagctggtcaattccatttattcgactggctatctggcctttccgcgcgtcaagggggaacccaatgctgcccgtccccaagactgtcgaatcttagaacgagagggaactgtgttgtggaaaaatgtggaataa

SEQ ID NO: 1907 - DNA, 245 bp, Unknown
  JGI25616J43925_10007359
gatagagatatagttgctaaaaatatggcgaaatcttccgccgtattcatggaactaccagcgggcctcttcggaggcagcagttcgatgagcgatcacaccttgggatgtttgctccagtctcaagctctgtgggtatgcattaagggtagcggaaacgtgaacgtgtgcctaccgtaaaaacgtcgtcgaacagtcgcgaggagcaattcactccgacaggagggcttatagccatgatgtgt

SEQ ID NO: 1908 - DNA, 966 bp, Bacillus sp. AFS014408
atgcgtgtatttgtcaagaatgtaagaggagaaccgctcatgccttgcagtaatcgcaaggcacggcttcttctcaaacaaggaaaagcaaaaattgtgaagtacacaccatttacgattcaactcctatatgccaccggtgaaacggtgcaacccgttacaattggcgttgatagcggagcaaagcatatcggtattgcgattactactgcagataaagtgctagcaaaaggaaccacccagctgcgtcaagacgtcaaagaaaatcttatactaagagctacattacgcagaggtagaagacaacgaaaaacaagatatcgagaagtacgttttctcaaccgaaaaaagaaagaaggatggttaccgccatcgattcaaagcagagtggataaccaaattcattggattgaaacatttcgctcgttattaccatctccaaaagtgattgttgaagtaggggaatttgatgcacaaaagctaaaaaaccccaatatacaaggaacagaatatcaacaaggagatacttttggcttttggaatacgagatactacgtatttgcgagagacaactacacctgtcaaatttgtaagaaaaaaggtggtattttgcatacgcatcatatcattgaacgatgcaatggcggttcgaatatggcagataatcttgtaaccgtgcatgatgaatgtcatcaaaaacttcatcaagggaacatcaaacacagtttcaagaaagtcaaacaatataaagaaactgcttttatgaatatattgcggctgcaaatcatgaatcgtttagattgtgacattacgtatggtagctacaccacaccaaagagaaaagaacttggattagccaaaacacatgcaaatgatgccattgcgattaccaatcccatacaactacaagaatacgatcaaagcggtgaattttgcatcaagcaatttagaaagaaaaaacgctcc

SEQ ID NO: 1909 - DNA, 265 bp, Bacillus sp. AFS014408; identical to SEQ ID NO: 573

SEQ ID NO: 1910 - DNA, 1380 bp, Paenibacillus wynnii
atgcgtgtattcgtcaaaaacaaaagaggagaggcactcatgccctgctcggtaagaaaagctaggcttttacttaagcaacaaaaagcaataattgtcggttatcaaccgtttgcgattcaattgactatagccacaggcgagactgttcaagaacttcacgtcggtgtcgatactggcgtaaaacacctcggcatcgctgtcatcagcgaagataaaattttcgctcatggcgaaattgaattccgtcaagatgttagttcgctgctcgaaactcgcaaaacgtatcgccgtagccgtagaaatcgaaacacgcgctacagacgctgcaaatacaaatttaataccaaacgtgtttttgataagaaaaagaagaagtggataaaaccctccatttcgctcacgtccaaacgtccagaaggctggttaccgccttcgcttgaaaaccgcatccagcatacctttcggtgggtggacacctttacgaagctgttaccacatccaaagcttcatcttgaagtcgggaaatttgatgtgcagaaaatgatgaatcctttgatccaaggcaaagaatatcaagaaggagaaaccttcagctaccacgaggttcgctattacgtgtttgctcgggaccactatacgtgccaagtctgcaaaaagaaaaacaaaatcctaaacacccaccatatcatctaccgttcgcataaaggtagtgatcgcgccgataatctcataacggtgtgtaccgattgccatacgcatgagaatcatcaagaaggtgcgattttgtggacgtggatgatggctaaaaagaaagtgaagcaatataaggaaccgccctttatgcatgtcttgcgcaaacgaatcttttcccgttaccccgaagcacgcattacgtatgggagtgaaacgactccccaccggaaaacattggcgctcgaaaaaagccatcaaaatgatgcgatcgcgatcataggcatatctaaaatcaatgaacacccttgctcgcacttccgcatcgtacaatttcgaaaaaagaaacgttcactgcatgaagcaacggctcgaaaaggtcgaaaagagcccaattgtttgcaaaaaagaaacgccaaaaacacgaaagaatccttaggattccttctgaatgatcaagtttgcatccatggacagcgtggttttattacagggttcacaggaccatacgtccaaacaattgaaggaaagtatattacactgccaggaaaatcgtacaaacaagtgcctttgagagaactgcgccgaatggcacatcacaacaactggcagtatacgatccaaattgagacacgccctattcatgccccacctattaaggacggggaattacgggcaatttgttaa

SEQ ID NO: 1911 - DNA, 243 bp, Paenibacillus wynnii
gtcaactccccaccacttaaacggtaaagcgttatgaagtgggggcttgaaaaagccctagttgtctagccttagctttaagctacgttgggcatgtcaatacggcttggtgtaattccctagcaccttttgtcgttcaggcgctgtaacagttctgttgggtcggaacggtcaacctgaggcacgaagcatgtccaacattggcgaagggaaacaaactctaaggagggacgaaacatgcgt

SEQ ID NO: 1912 - DNA, 1281 bp, Unknown
  human gut metagenome genome assembly, contig: NODE_5646_length_3670_cov_1.870263, whole genome shotgun sequence WGS
ttgagagtatttgttttaaacaaacgtgggcaaccgctgatgccgtgctcaccggcaaaagcaaggttacttctcaaagagagaaaagcaatcgtcaaaaggcgcacgccttttacgattcaactcacgatcgcaacgggcgaagcaaagcagcctgtaatgcttggcgtggattccggctacaagcacattggtctttcggccacaactgaaaaggccgaactctatgcttcggaagtcgaactgcgtcaagacattacggatcttttgtctgcgcgtcttgctttgcgccgctctcgccgcagccgcaagacgcgctaccgtgcgcctcgtttcgacaaccgggtggcaagcaagcgcgaaggctggctagctccttcggtggaaaaccgcattgcggcgcacatgtcgcgcgtagaagcggtcatgcaggtcttgccggtgactgccataaccgtcgaaacagcggcgtttgatacgcaactgctgaagaacccggacattatcggagcggcgtaccaacaaggcgaacagctcggattttggaacgtgcgggaatacgtgcttttccgggacggacacgtttgtcagcaccgccgcgggaagtccaaagatccgatactcaatgttcaccacattgagagccgtcgaaccgggggcgatgcgccgaacaatctcatcacgctgtgtgagacctgtcacaaggcattgcaccgcggcgagatcaagctcaaagtcaagcgaggcaagtcgttcaaagcggaaaccttcatgggaatcatgcgttggacgttctttgaacgtttgaaaaaggctcacccagaactcaatgttcgcaacacctacggttatctcacaaagcacaagcgcatctcatacgggatcgcaaagagccactgtgcagacgcgtactgcattgcggacaaccttggtgcaaagcgcctggagggctttttctttcaaaagcaaacccgaaagcacaatcggcagattcacaagctgtcaattctgaaaggcggattgagaaagaagaaccaggcaccctacgaagtcaaaggcttccggctttttgacaaagtgatgtgcaaaggcgaagaagccttcatctttgggcgaaggacttcgggaagttttgatgtgcgccgtcttgacggtactcggatttccgccggtatcaactacaaaaaattgaggctgctggaacctcgaactacctacttaacagaatttagaaaggaggcggcgcttcctcccctgcatgaatgcaggggtttccgcgcc

SEQ ID NO: 1913 - DNA, 249 bp, Unknown
  human gut metagenome genome assembly, contig: NODE_5646_length_3670_cov_1.870263, whole genome shotgun sequence WGS
gtcaacaacccctgcctaaaggcagaggcttgataaaagccttggttgactagcctcagaccgcccaaaaggcggactacgttggttgggaatgcataggcaccgcgggatgtcaatcctagtcccgcgctctgcggttcgcggttaaaagctctgagaggtaggagcggtgccgcgaacaggtaaaccccttccaacattggcgaaggatttcaaccggtcgcaagaccgaggagacaaatcttgaga

SEQ ID NO: 1914 - DNA, 687 bp, Anoxybacillus flavithermus
  MISC_FEATURE (230)..(329): Any "n" represents any nucleotide
atggtcgaggagaatatgacctgctttatgcagaggaaaggggagaaccctatggtttttgtgttagacacaaacaaacgtccgcttgctccttgtcacgaagcagttgcaagaaagctgttgaaacaagggaaggcggcgatttacaggcgatttccatttaccatcatcttgaaaaaatcagtagacgaatcagaaattaaagcaacatatcggctaaaaatcgactnnnnnnnnnnnnnnnnnnnnnnnnnnnnnnnnnnnnnnnnnnnnnnnnnnnnnnnnnnnnnnnnnnnnnnnnnnnnnnnnnnnnnnnnnnnnnnnnnnnncgaaagacacaacaaatcacttatatttacaaacaaaagaagtgtatttatcaaggcaaaagggcgtggtagtcgctctcgtacaaacctagatagatatggcttcccaagaggttatcttgcaagacaaaaattcttctttggttttcaaacaggggacatggttaaggctgttgtcccaagagggaaatatcaaggcgtttggtttggcgaagtcgcatgtagaaagactggaagtttcgatattaaaggcaaggacggaaagcgtatcgcacaaggaataaattatagatatgtccaagtcattcagcgatttgacggatatgcttatggaaagggggtggcggaacttgcgtaa

SEQ ID NO: 1915 - DNA, 244 bp, Anoxybacillus flavithermus
gtcaacaacccaatgactaaaatcatgggcttgtaagccccatgttgatcagaccaaggcttgaaacagagcctacgttatagatgtcatgacacgttcgggtgcttctccatcccgttcctctgtcgtgcaaggttaaacaagcgtggtgggtagcgctagtgtcttgcacataacaagcatctataacatggtcgaggagaatatgacctgctttatgcagaggaaaggggagaaccctatg

SEQ ID NO: 1916 - DNA, 1410 bp, Unknown
  Ga0121719_100007 JGI
atgccccgtaaagtggatgtaaacaacggttatattttagtggttgaccagcatggtcagccgttgatgccgtgtttgtcgtcacgagctaaaaaattgcgtgaccagaaacgcgctcgaatttacagcatgcaaccgttcaccattcagatattggaccgatcggttaatagcagtgtcttacaagagagcgaattgaaattggatccgggcagcaaaaccaccgggatggccttgtgtgtcaaaggggatatccgagggtggttcgtggccatggccatccatattgaacaccgaagtcatcatatccgtgatgcgttaatctcgcgaagtcaaatccgacgttcgcgacgcaaccgcaaaacccgttaccgcccaccacggttcaaaaatcgttcaagaaaagccagaacagcacaaggttacaatgtatggttccccccgtccttggtgtcacgaattgaaaacattgtcaatctggtaatcaagtttggcaaatatttccccgtaacacagattgcgggagagtttaacaagtttgacacgcacaaaatgcataatcctgaggtcaatggtattgaatatcaacgcggcacattgtatggggttgaagtgcgagaatatctgttgcaaaagtaccaatatacctgtgtgtactgtcagaagtgtgcatttcaaaataataaatccacgggtttaaaattggaaattgatcacgtggtgccccgttccaaaggcggcagtgatcaagtgaacaatttggtgttggcgtgtcacagttgcaaccaaaacaaaggcaatcaatccctccaagaatttctcaaaagaaaaccgtctgtgctcaagcgtattcaagagagtttggggaaaccattgaacttacaagacgcagctcagatgaacaccatgcgcaaagagttgtatcaggtgttgaaaaaacggaccgggttgcctgtgaaaacctatacagcgtctcaaaccaagttcaaccgcgtgcagcagaaacaccacaaagaccattggattgatgcagcctgtgtaggtgagagcggaaaccaggttaatattcagcacatctctcatattattgtttggaaagcagtggggcgcggcaatcgtcagatgtgcttaatggatcgctatgggtttccccgaaccaaagcaaaaacagtcaagcgctacatcacgtccatgggtcaaggtttccaaaccggtgatatagttcgacttaagcagccttcggggaaataccaaggaacacatatcggtactgtttcgatccgtgccagaggtcaacttgatatcaccacacaaaacgggcgaaaaatcacatcccattggaaaaattttcgaataatctcccggctcaacggctatcacgttaacccaaaacgagtatcttatggttga

SEQ ID NO: 1917 - DNA, 196 bp, Unknown
  Ga0121719_100007 JGI
ctcaaccagcagatatgttgaataaaaaaggagggaaattaaaacaacatatcaacgttatacatgaatatataggtacctgtctgtgcttcaccagcaagcagctctacggcccacagttaaacagaatttcctcatgtggaaacagttgtatgcgtcgacaatgcttttgtattggtaaaccaagacaacgcgt

SEQ ID NO: 1918 - DNA, 1254 bp, Unknown
  Ga0307928_10003230 JGI
atgcaaaaagtatatgtacaaaacaaggatggagaatctttaatgcctactgaaaggtatggtgcagtaaggagatggcttagagacaacaaagcaactgttgtaaacctaactccttttacaatcaaattaaactttgattgtgagaacaacacacaagaagtagttgtaggtttagatactggtgcagttaatattggttgttcagcagtaaacaacaatgggtgtttgtatgcttccgaaacaaaactaagaacagacatacataagaaaatgcagagaagagttatgtacaggaaaactagaagagttagaaaattgagatatagacagccaagatttcataataggacaagacctaaaggctggctgccgcccagcctaaaaagtaagttggactcaactgttaaggtaataaggcaattagcagagatcctaccaataagtaaggtgagagttgagattgctaagtttgacacgcagaaattgcagaacccagagattcaaggtaaagggtatcagaaaggggttactgaaggatatgataatgttcgggcttatgtgtttgagagggataagtatacctgccaaatatgtaagaaacgagaaggaatcttgcaaactcaccatatcatacaaagaaaagatgaaggaagtaatagacctgataatcttgccactgtccacaagagttgtcattctgattttcacaaaggattaattcaacacaagtttagaaaaccaaaggcatataagatgcaatcccaggtaacaatcttaaaagatttcatcgttagtgaactaaagaaaaacttcaaagttgaagttactttcggtcatataacaaagagaaataggatgagattaaacttgccaaaatctcattgttttgatgcagttgcaatatgtaatcctaaaaagattgaaaggctaactcatatattcaaaaggaaatgtataactcaaagaaggtatcagatgactaaaggcataagaagtgagaagaagttgcctaaaggagaattgtttgggttcaggcaatgggataaggttaagattaataatcgggttggatttatcaaaggtaaaagaagttcaggattttttgacgtttgtgatattgatggaaacaacatatcacattcaattaaatacacaaacctacaaagattatgtgggaataatataatggaggtaagcgtttctcctcccacgactaaagtcatgggtatccgaaatgcaaaagttttatga

SEQ ID NO: 1919 - DNA, 267 bp, Unknown
  Ga0307928_10003230 JGI
gtaacacattcccaccctctaaagaggggggcttttaggtaactaagcctgtgttaccagacttagcaaaggaatttgctacgttatttgagatgtagaaacccaacaatttgctcagttgttggctctttcgtggcactgtaaaagtcttgagggattcgagacagtcaaccacattgcgaagctcggataacattgttgagagcaacataacagtttgaaggaactggcttacagcaaaaatccttcataaacaaaatgcaaaaa

SEQ ID NO: 1920 - DNA, 267 bp, Bacillus selenitireducens; identical to SEQ ID NO: 1919

SEQ ID NO: 1921 - DNA, 235 bp, Bacillus selenitireducens
gtcaacaacccaacgactaaagtcgtgggcttgtaaaagcccctgttgactagcctaagtctttcgaggactacgttggatcggtcaagacaccttacggtgcggattctagctgtaagccctgtcgcttgtgattaaaagtccgaacgggttgtgggcggtgttgcaagcgtaaaagcctttccaacattggcgaagaatacctgactcctgaaaggaggtacacgttatgttc

SEQ ID NO: 1922 - DNA, 1311 bp, Unknown
  Ga0393278_0005903 JGI
atgttagtctttgttctgaataagtatggaaagccacttatgccttgtgaaccaagcgaggcaagaaggcttcttcgagatggtaaagcaaaagttaagagccggataccatttacgattaaattactttatggctcttctggttacaaacaacaaatttcattaaaagtagattctggttctaaggttgtaggatgtgcagcagtaagaagtgatggggaaacattatatgcaagtgaggtggaaactagaaaagatattcataaaaggatgacgcgacgttcttcttatagaagaactagaagaggtaggaaaacgtgttatcgtcaagcaagatttagtaatcgttgtagatcaaaaggttggcttaccccaacattaagatctaaaattcaaactcatttgaaagaaattaattatgtaaaatcaattttaccaataagtgaattgattattgaaacggcatcttttgatattcataaaattataaatcccgaagtaaatggaattgggtatcaacaaggtcaacaaaaaaattattataatgtaaaagcatttgtatttcatagagacaaatatgtttgtcaaaaatgtaaaaacaaaaaaaataatgtaaaattaaatgttcatcatattatatttcgctctgataatggaacaaattctccggataatttaattacattatgtgaaacctgtcatgataaaatacattctcatattgatgcaaaaaaagaatctttaaaattacaaaagaaaagaaaaattaatacaaccgatgctacacaagttttaataatttgttcttatttaaaaaagcatctgcaattcaaagaagtttttggttatgaaactaaatttaatagagaaacaattggattacccaaagcgcattttgtagatgctatgtgtattggattgactgatggtgaggttgtcaaaatgccaacttatgtttttaaaaaaattagtattaacaaaggagattatcaaagaaccaaaggaatcagatcagaattggaaatcccaatgggaaaaataatgggatttaaaaaactggatagggttaagtattttaaaactacagcttttgttaaaggtagaatgtcaacaggttatgcaattttaatagacatttatggaaatgaattaaattttggacatattccaaaacttgattctatgaaaagatttggagctaggaaaacatgtcttacaaatcaaattttcatagaaagtttcacatcaaatatcatattatattctgttgtaaatatagaaaaaacatcttcaaagaaaaaaaaattatag

SEQ ID NO: 1923 - DNA, 253 bp, Unknown
  Ga0393278_0005903 JGI
tgaagcctcccctagactaaagatctaggggcttccaaagaaaggagaaagacaagggaagctacttcaccagaacaccaacagagaggatctaaaatgttggtaaacgatagggtagaatatataggtacttcagaatgcctactcagttctgaactctacggatgtaatttaaaagtgacgagaggagttgcggtgattacattttataaacctacccatatccgttcgagagtaagtcgtgttgaaatta

SEQ ID NO: 1924 - DNA, 1401 bp, Unknown
  Ga0209719_1005600 JGI
atgcagaagttatcagagagacaattaattaacacacctacgagtgcttcactagctcgtagctctgtggttccgtctttaaacagagaggaaactctcagtgagcggagcttctcgacctctgataacaatcccgaagtgaacaacgcccacatacaggcggtcttaaagacaaatgtgtatgtattagcagtagatggcaaaccattaatgccatgttcaagagcgaaagctagaaagttattaaagagcaacaaagctacaattgttaaacataatccattcactataaaactaacttttgaatgtgaaaaccaaattcagtctattacattaggagtagatactggatatcaacatataggattatctgctaaatcagaaaaggcagagtattggtcttcagaagttgtattgcgaaacatttctcctttattaacagaaaagaaaatgtatcgtcgcggaagacgcaataaactgtggtatagaaaaccaagattcttgaatagaaaacgtaaaaaaggatggttacctccaagtattgattaccgcataaattctcatatcaaaatcattgagaaagtatgttctttgttaccaattacttccattatagttgaagtagcaaactttgacatacagaaactcaagaatcttgaaataaaaggggtaggttatcaacagggagatctatatggatatgaaaatataaaatcgtatttaatcgaacgcgaacacgccagatgtcaactatgccatgaaagatcaacacgtactaattcattcagagtgcaccatataatacaaaaaagtaaaggtggcacggacaaacctgacaatcttgctttgcttcacgaaaaatgtcatactaaattacacaaagagaatttaggacacctattaaccaagaacaaacaatacaaagcagaaacctttatgtcaattatgaggaatacgcttgtaactgaactaagaaatacgcatacggtaatggaaacctttggtcatattacaaagatgagaagaaacacattgaacattgaaaagtctcatattaatgatgcttttgtgatagccaagggcagtaaccaagtccgttctgcgcctctgactataattcagaaacggcataacaataggtgtcttcaattgaacaggaagggcttcaaaccttcagttagacaccagagatatccctaccaacccaaagacgtagttatgattcaaggtgtctattatgatgttactgggacttttaacaaaggttcttggatacgggtaacaaaagcaggaacagtgttcaacttttctacaaagaaggttgaaagacattatgtaactaacggttgggcaattcatccacaccctgaaggatgtggtcttcttgccccacagggataa

SEQ ID NO: 1925 - DNA, 259 bp, Unknown
  Ga0209719_1005600 JGI
gtcaactaccacgtcctaaagggcatggcttgaacggtgacgttcgacgcaagagttgattagggagcttaggtgaaaatctatgcagaagttatcagagagacaattaattaacacacctacgagtgcttcactagctcgtagctctgtggttccgtctttaaacagagaggaaactctcagtgagcggagcttctcgacctctgataacaatcccgaagtgaacaacgcccacatacaggcggtcttaaagacaaat

SEQ ID NO: 1926 - DNA, 1035 bp, Unknown
  Ga0394882_0003342 JGI
ttgggttacgacaccctgggatgcgtagctagtcccctgccctgtcatctgcaattaaacagttctaaggtcactggagcagtgttgcaggtcgaacaagcccagataacaaggtcgaagctaacgttacgagcaatcagaaaggacgcaacaatgtctaatttcgtttttgtactcgacaccaatcgcaaaccgctctcaccctgcaaaccaggggtagcgagatctttgctaaatgctggcaaggcggcggtattccgtcgatttccgttcacgattattttgcacaaggaggtagaggcaacgcctgaacctatcgaacttaagttagatcccggttctaaaacaactggaatcgctctaaaacaaggcaacaaaatcattgttggcgcagagctaacccatcgggggcacgccatcaaagccagtcttgattctcgtcggtcattgcgccgggggagacgttctagacatactcgctatcgtcaagcacggttcctgaatcgcacccgtcccgatggttggttagccccaagtctgaagcatcgggtagaaacaacgttgacctggtttgagcgattctgcaaagttgcaccgattggctcaattgttcaagaactggtacggttcgacctacaacagaggtcgaaccctgaaatctcaggcgttgaatatcagcagggcgaattgcaaggttacgaggtgcgcgagtacctgctgaacaaatgggatcggaagtgtgcttactgtgctaaagcaacggggcatggtactcggcaaatgtgtcgcaccgataagtatgggttcccttctcggtatgcgcctcggctcaagtttgttcaaggctttcagacaggcgacattgtgaaagcagttgtcaccaccggcaagaaggtcggtgaatacgtcggacgagttgcagtccgatcagtcggttcgttcaacatctcaacatctcaaggattagtgcaaggcatcaatcacaagtactgcaaatcaattcaacgaaaggatggctatagctatggcttttga

SEQ ID NO: 1927 - DNA, 270 bp, Unknown
  Ga0394882_0003342 JGI
gtcactaacccccgactaaagttcgggggcttgcagactgcccgacgctaacgcgcgggacttgcaagccgtagtgaccagaccacccgaaagggtagccgttatttgggttacgacaccctgggatgcgtagctagtcccctgccctgtcatctgcaattaaacagttctaaggtcactggagcagtgttgcaggtcgaacaagcccagataacaaggtcgaagctaacgttacgagcaatcagaaaggacgcaacaatgtctaatttc

SEQ ID NO: 1928 - DNA, 1347 bp, Unknown
  Ga0334896_1003582 JGI
ttggtatttgtgctaagtaaaaacaaaaaaccacttaatccttgtaataatgcagtagccagaaagctactaaaacaagggaaagcagttattcataagaaatatccttttactattaggcttaaatatataattaatgagcctaagttaaaggaatacactttaaaattagatccaggagctaagattactggcgtagccattgtagaaaataagcctaaccatgctaaagtagtttttctagctaatttagagcatagacaaaatattaaatctatattagatgatagaagagcatttagaaggactaggcgaaatagaaaaactagatatagaaagccaagattttcaaatcgaacaaggactgagggttggctaccaccttctattcagtcaatagtcggtaatattgagtcttggactaaaaagataaagaaattatgcaatatcacagcgatagctgttgaaacagtacgctttgacactcaattaatggacaatcctaatattgagggtgttgaatatcaacaaggtacgcttttagggtacgagcttcgtgagtacctattatataaatatgggcatgagtgtcaatattgcaaaggcgaatcagaagacagcgttcttaatatggaacatatgatttctaaggctaatggaggtagtaatagagtatctaatttaactttgtcctgtcggacttgtaatgaggataaaggtccacttaatttatctaattggttagatattttaaaaacacaatctaagacaaagttaaataaagagagaattaaaaacatagaagttatccttaaaaaaggacttcctaagtcctttaaagatgctgctaaggttaattcatcaagaaaagctacctatagagtgttaagtaattatacttcagatttagaagtatcatcagggggcaggactaaatttaatagaactacttcaaatttacctaaaactcactattttgatgcgctatgcgtagggaagaatacttctgatagttttacattcccaaaagcattgaaagtgctaaatattaaagctataggcagaggttcaagaagtcgtactaacttaaataaatatggcttccctagaagctacttaccaagacaaaagtatttcttcggtttccaaactggagatttagtaaaagctgaaatcccaaatggcaagtatcaaggcgtgtattatggctctgtagcttgtcgtagtaaaggtagctttgacattaaaactactgatgggaagagaataagcactaactacaaatacttttcattaatacaaagacttgatggttacaactatggtgttgaggatattgctctttaa

SEQ ID NO: 1929 - DNA, 267 bp, Unknown
  Ga0334896_1003582 JGI
gtcaacttctccacgcttaaaagcgggagctttttgtaaaagaagctcatagttgaccagtctaagtctttaatgactatgttatttaggttatgacaccatagggtacttctctagctctatgcaactgtcgattagtcttaaacaactcctgcggagagaagagtagtgtgctaatcttaaaaagcctttataaccttgacgaagagagactgtctttgagacagcgttacctacattttgtagaggaaggagtttttacctttg

SEQ ID NO: 1930 - DNA, 1386 bp, Unknown
  Ga0101770_1016828 JGI
  MISC_FEATURE (434)..(434): Any "n" represents any nucleotide
  MISC_FEATURE (436)..(436): Any "n" represents any nucleotide
  MISC_FEATURE (438)..(438): Any "n" represents any nucleotide
  MISC_FEATURE (440)..(440): Any "n" represents any nucleotide
  MISC_FEATURE (445)..(445): Any "n" represents any nucleotide
  MISC_FEATURE (816)..(816): Any "n" represents any nucleotide
  MISC_FEATURE (825)..(825): Any "n" represents any nucleotide
  MISC_FEATURE (834)..(834): Any "n" represents any nucleotide
  MISC_FEATURE (840)..(840): Any "n" represents any nucleotide
  MISC_FEATURE (1290)..(1290): Any "n" represents any nucleotide
ttggtattcgtgctggacaaacacaagaaacccctgatgccgtgcaccgagaagcgtgcgcggctgctgcttcaaagaggccgcgcggtggtgcacaggatagcgccctttaccattcggttaaaggaccgggtggcagaagaaagcgcgctgcagccgttgcggttgaaagtcaagcctggcgcaaaagagaccgacatggcagtcctgcgggaagagaccacaggcgaatccgaagctgtcatgctgcttgaactccgccacaagcccggcataaaacagagccttgacagccgcagggccatgcgccgcagcaggagaaaccgcaagacccgttaccgcaggccccggttcgacaaccgcaatcctgcgaagtgcgccgcctgcggcaggaacgcgagacatggcaaccgttactgccgtccttgcgaganancnanaaacnttgtcgataacggttaccgtgagaagcggctgccggcttccctggaagcccgtgcgaaccagatcatgaacacagtcaagagactgaccaggctgctccctatagcgtcgatatcatacgaaaacgccaaattcgacacccaactgctgcagaaccccgagattgccggggttgagtaccagcagggcgagctttttggctatgaagtcagggaatacctgttagagaagtggggccgccagtgcgcctactgcggcaaaaacggcgtgccgttagaaatcgagcacatcgtgcccaaatccaggggcggcaccgacagggtgtccaaccttaccctggcctgtaaagactgcaaccaggagaaggggacnctgacggcngaagaattnggccancccgaggtgcaggccgaagccaggcggccaatgaaagaggaagcgatagtcaacgcaacccgctggaagctgttcaaccagttaaagaatatcggccttcctctggaatgcggcacggcggccctcacgaagaagcagcgcattgagcatggtttgccgaagagcaaatattacgaagcctgcgtagtggggaagagtacgcccggcaaactggctatcaggcagaaatacgttcaggtctggacagcagtgggccgcggcagccggaagatgtgcaacacagacaagtacggttttccggtcagccaccgggccaggcagaagatgcgctttggttttatgaccggggacttggtggtggccgagatacccaaaggaaaatacgctggtcgctgggttggcagggtggccgtaaggtcgagcggctacttcgacgtaaaagacggcgcnggcaggcgggtgtgccagggagtgtcccacaggcatttccgcctgttacagcgtgccaacggttggcaatacgaaaaggaaaaattagcgggctga

SEQ ID NO: 1931 - DNA, 350 bp, Unknown
  Ga0101770_1016828 JGI
gtcatagaccccacgcctaaaggagggggcttgctgggaataactcccggcaggtctccgttttaagcggaaagctgctcttctgggcggcgctatgacccgccccagcgtgggagccgatggaccaggcgtatgaaccacgctacgttaaggaggtcatcacatcttggaatgcttctctagttccttgccctgtggtgcggcattaaacagcgagcgggggtgtcagcgagcagtgtgccgcacgcaaaaagcctccttaacattggccaggagagacgcccgggcgagtccggcccgggagcgtcacaagccccgtaaggggtctccggaaggagatgctcaaattg

SEQ ID NO: 1932 - DNA, 1527 bp, Streptomyces sp. NBS 14/10
gtgcctcctcagcagcttgctctggaattcgagtcagcagacaaccccgggaacagggacgaaacgggactcgaacaccgcgctgcggtaccgggcgcggaacctgtgcgagaggagacccgcaccgcttcacctggcgatgcgggcatcacccccaaccacccggttggggagaagccgcgtgagcggcacccattcgtgttcgtcctcgacaagcacggcacaccgttgcaaccctgcactgcggcccgtgcccgcaaaatgctcaagaagggacgtgcggttgtccaccgtcacaccccattcgtcatccgcctcaaagaccgcaccgcagcccagtccgagacagacggggtggagatcggtatcgacccgggcagcaagcacaccggtatcgccctgttcaccgcccgcgcgggggagcgccgggcccggtacagcgtgcagctcgaccaccggggcgcgacgatccgcaagaagctggagcagcgtgccgcctaccggcgcggacgccgcacccggaacctgcgttaccgcgcaccgaggttcctcaaccgcgcccggcgcgagggctggctgccgccgtcgctgcggcaccgggtggacaccactgtgtcgtgggtatcccgtctggcccgctgggcaccggtgagggccgtgcacgtggagcgggtggcgttcgacactcacgcactcgcggccggtcgcccgctggaaggcgccgagtaccagcggggcaccctgcacggctacgaagtccgcgaatacctgctcgccaagtggaaccggacgtgcgcctactgcggcgcgaccggcgtgccgctgaacatcgaccacatccacccccgctcacgcggcggctccgaccggatctcgaacctggccctggcctgcctgccctgtaacgagaccaagtcgaaccggcttgtggacgagttcctggcccacaagccgaacctcctggctcgcatcaaggcacaggccaaagcaccgttgcgggacgcggcagcggtacagtccacccgcacggccctatggcgcgccctggacgcccgctggcccacgcacaccgcctccgggggccgcaccaagtggaaccgcacccgctgccacctggccaagacccacactctcgacgccctcgccgtaggcacgctcgacacaatcgcagaaaccgtgaccacggtcttgctcgccggatgcatcgggcgcggtacccatacccgcacccgcacgaacaagcacggcttcccccgcttgcgcatgccccgccgcaagcggttcttcggcttcgccaccggcgacctcgtcaccgcccacgtacccaccggcaagaaggccgggacacacaccggacgggtagcagtccgcaccaccggaagcttcaacatcaccacccgccacggcaccgtccaaggcatccggcacaagcacgtccgtctcctccaacaagcagacggatacgcctacaccacccttcccgagcattccacagcgataccccgacgcaccgcgccggaggactga

SEQ ID NO: 1933 - DNA, 338 bp, Streptomyces sp. NBS 14/10
gtaaccggttcccccgcctgagggcgggggctttcagccgaactggctgaggcccgtgtgttaccagcaccagccaacacctttggaggaggtgaccgaagttggctacgttccgcgcacgacagaagacccaccaggctgtgcctcctcagcagcttgctctggaattcgagtcagcagacaaccccgggaacagggacgaaacgggactcgaacaccgcgctgcggtaccgggcgcggaacctgtgcgagaggagacccgcaccgcttcacctggcgatgcgggcatcacccccaaccacccggttggggagaagccgcgtgagcggcacccattc

SEQ ID NO: 1934 - DNA, 927 bp, Unknown
  Ga0334813_001619 JGI
ttgacaagggggcctgcgaaagcgggcagaagttgttttggtcgcgacaccatgggatattccgcacgtcccatgcaactgtcgccggtggttaaaagtcctgagggcaagggacggtgctgccagcacgacaagcctttacaacaaccccgatgcggctctaacctctcgtcggagagagaaaggaactttatgttagttccagtattaaacaaagacggacggtccctgatgccctgccacgccgctaaagcaaggcggatgctcagggaaggcacggccaccgtagtcaaacgaacgccgtttgtgatcaagcttgtatacggcagttccggctataggcagccgatgacgctgggagccgacagcggttatttgcatgtcggcatttccggggtaacggacggaaaagaggtctatgcggcggatgtgggtctccggaaagacatggtaaaactcaacgcggagagaaaccactatcgcagaggccgaagacagcggcatacgtggtatcgcaaaccccggttcgacaaccggaagaaacccgaaggctggcttgcgccttctattcagaacaagctggacacccaggtaaaacttatcgagaaaacagcgcgcattctgccgatcacacgcgtagtcgtggaagtcgcggcattcgatatccagaagatacaaaacccggatatcgaggacactggataccagaacggagcgcagaagggattctggaacgtccgtgagtatgtcatgcacagggacgaccatacctgtcagcagtgcaagggtaaatcgaaagaccctgttttcacggtccaccacatcgaaacccgtcagaccggtggaaaccggccggacaatctcgttacagtgtgtaaaacctgtcacgggaagatatcaaggggagagatcgcccccgaatttaag

SEQ ID NO: 1935 - DNA, 321 bp, Unknown
  Ga0334813_001619 JGI
gtacaagactcgggaaaggcgttatcctgggaggacaggcaggtctcgttggccacatcgacctcggcgatcatgtcatggttggcgcccagtcgggtgttcatgacgacgtccccgcaaaccaggttgtgtccggttcaccccataggccccacagacaatggctgcgcgcagaggcatgcgtttcacaacttccggagatgcggaaaaacgtagcctccatgttgaaaaggctcgagaaactggaaagggacaaaaaaaataagacccacagcaccaaatcctgagtgctcgactgcgtcagaatccaaatacatagaa

SEQ ID NO: 1936 - DNA, 1116 bp, Unknown
  Ga0209617_10003712 JGI
atgcgagtacctgtaatttcagtagacaatattccattaatgccagccaaacctagtcgcgctagacgttggattaaagaaagtaaagcaattggtaaattcaacaagttaggtattttctatgtccagttaatagctgaaccatctggcatgaaaactcaagaaatagtaattggattagacccaggcaaaatgttttctggtgtagcggttcaatctcaaaaatacaccttacaaatgttgcacttagttttaccattcaaaactgttaaagacagaatggaacaacggtctatgttgcgacgcggtagacgtggtagacgagttaaccgaaatttttctttcaataaacgtagtcaccgtcaagctaggtttgataatcgtcgggggtctaaacttcctccaagtattcgagcaaacaaagatttagaatatcggacaatcacacttctttgtgatatttacccggtaaaaacaattgtcgctgaagaggtagaagcaagaggaaataagagttttagtccagtaatggtaggtcaaagatatcaaattaaccgattatctgaactagcaaaagtagaattaagaaaaggatgggaaacatcgaatcttcgtaaacacttgggtttacacaaagcaaagtctgataagtctctacaaatcccagagactcacgcagttgacgctgtgacactagcgtgttccgaatttgttaaatacaagtcgtgggaaggtgctaaaactcatggtgctagttgggtgggaaatgcaattattaccaattctcaatttacgattttacgccgtcctccaatcagtcgcagacagctacacttaatggttttctcaaaaggtggaaatagacgaaaatacggaggtactgtgaccagacatggctatagtaaaggtgattatgtcgaagctactcaaggcaataaaacatatagaggctgggtaagtggagacacaaaaactcaagtttcagttagtgattttaactggaaacggttagggcaattcagtaaaaacaaagtccgactaattagacgctctattggactaattatcactgcggttaaaaccgctcgcgtcgcttccctctcagcactaaagtga

SEQ ID NO: 1937 - DNA, 219 bp, Unknown
  Ga0209617_10003712 JGI
gtcaataactcagggttgaagccactgagcttgtaagaaacaagtcttacgtgtttgactagctcattgagatgcagtttggtacgaacttccgaatacttccccagttcggattatcttcaaactatcttgttaatagtgttgctttgggcaagacatcttaactgcgttgagcgaggggacttaaacttttactccaaggattatctctttatgcga

SEQ ID NO: 1938 - DNA, 747 bp, Unknown
  Ga0133913_10206209 JGI
atgaacagagtttttgttttagatacaaataaacaaccactagctccctgcacaccagcaagagctagacagttgttagataacaataaggctgctgcctatcgatataatccattcacgattatattgcatagagaagtagaattagatgcacaagataactattctattaacttagacccaggtgcagtgactaccggattagctattatcggtcatttccctaaacaaggtgatgttgtgatttttggtgcagaaattacccataaatctaaagctattaaagctaaattatatgcccgtagcagttttcgttctaatagacgtagccgtttgcgtcacagagaaccaagatttgataatagaactagaaaagatggatggttaccaccatccctcgaatcacgggtgaattgcattactcatttcgttaataaatttaaacatttaatatctaatgctaatatgtgcaatattgaattaccaaaattcgatacacaaaaaatgaataatcctaatatcaaaaattatcaatataaacaagggggtatgactaattttgataatacaaaagattatttaatccatagagatggggaatcttgtttctattgtggtgctacagatattaaattatttaaagaacatgttgcgcctcgcgcaacaggtggtaattcagttaataatctggtgttatcatgcctagcttgcaatacaaaaaaatctaataacccagttgatgatttc

SEQ ID NO: 1939 - DNA, 269 bp, Unknown
  Ga0133913_10206209 JGI
gatgcaataataagttttgttaggatggtttttaaactatcttaatgttcaaccagactaagttattagatttatctaataactacgttatgaagaaaagttaaagacttacctatgggtgcttctccagcccgtagctctaagagtacagaactaaacaggggctaaatcgatggcaaccgtgggtgtacatgaacttctttataactttgtcgaggagaccgttactaggtgggagaccacatttacacaggattcacatgaacaga

SEQ ID NO: 1940 - DNA, 1350 bp, Unknown
  Ga0265319_1000103 JGI
atgcagcagttaaaacagagaactaaaaagaacacacctacgaatgcttcacaagttcgtagcaactgtggtttactattaaacaaagaggaaactcttagtgtagtagactcaaaaacctgttttaacaatcccgatgtgaatcaagttcaacatacagaacggtcattaaaaccaactgtgtatgtaattaattataatggcaaaccactaatgccttgtagttatgctaaatctaaaagattagtgaaaaaaaatgctgcaagtgtaattaagttatacccgtttacaattaaacttaaatttgaatgtaaaaacaaggtacaaccagttacgttaggaattgatagtggttataacaacattggtttctcttgtactagtgaaaaatctgaattaatctctggaactcttgttttagatgataaaacatctaaaagattgacagagagaagaatgtatcgtagaaatagaagaaataaactatggtatagaaaaccaaaatttttaaatagaaagaagaaagaaggttggttagcaccatcaatccaaagaagatatgatactcatttatctttgattaaaaaattaaaatctatattacctatagcagaggtgattatggagaccgctaatttcgatatacaaaagatcgaaaatcctgaaataacaggaattgattaccaacaaggtaatatgtataattatcaaaatgttagaagttatttaatggctagagaaaagggattgtgtcagttatgtaataaagaatttacaaaaggtaactcaagtcatatacatcactgtaaaccaagaagcaaaaatggatcaaatagggcaaagaatcttgcattattacatgaaaaatgtcataccaaacttcataaacaaggattaaaactaaaacctgctaaaatttataaatcaaatacgtttatgtcaatcatccgtaagaggttttggaatgatatacttgatttgaaagttacttatggttacataacctttttaaaaaggcaagaatttggaataaataaaagtcataataacgatgcttttatcattgcaaatggatcaatacaagaaagaataaaatcaattaatattaaacaaaaacatagaaataatagagcaattcaattaaacagaaagggatttaaaccctctatacgcaaacaaagatatgcaatacaaccaaaggacttaatttggatatgtaacaaaagatatgttgttattggtatacaaaatagcggagcttatattaaggttgaaaattgcaagaaaattttacctgtaagccagattataaagatttataactttggaagtttaacatacaataattaa

SEQ ID NO: 1941 - DNA, 272 bp, Unknown
  Ga0265319_1000103 JGI
gtcaatcgccctttagctaatgaagtaaggggcttgaaccgtaaggtttaagggtaacgggttgattagggggcaaaaaattaaaaaataatgcagcagttaaaacagagaactaaaaagaacacacctacgaatgcttcacaagttcgtagcaactgtggtttactattaaacaaagaggaaactcttagtgtagtagactcaaaaacctgttttaacaatcccgatgtgaatcaagttcaacatacagaacggtcattaaaaccaactgt

SEQ ID NO: 1942 - DNA, 1062 bp, Unknown
  Ga0207156_10850 JGI
atggcagtatttgtattagacaaaaaacatcaacctttaatgccctgcactgagaaacgggcccggctattattaaaaaaaaggaaggctcggatccattctatgtatccttttacgattcgactgattaaccgaactgttcaggaaagtgtcctacaacctttgcgttgtaagatcgatccaggaagcaaagtgacaggtattgctattgtacgagaagacttcgaacaacaagtagttatctctcttgtagaattaactcatcgtggatcagtcattcgcgaagcattgcaagcacgtgcgggtaagcgaagacgaagacgttcttcactaagataccgctccccacgctttgcaaatagaactaaacccaacggatggctcccgccctctttgcgccatcgcatagagactgtgatgagctgggttcatcgattaaaagccagagcttgcattacagccattacatgcgagagggttagttttgatacacaaaaaatgacctctccagaaatacagaatgttgaatacagccaggggactcttttgggatacgaaattcgggagtatttgcttgaaagatggggacggaagtgtacttattgcaatgttcaaaatgtgcccttgcaaatcgaccacatagttcctaaaagttgtggaggctccaatcgcattgataatctcaccttagcctgcgcctcttgtaatcagaaaaaaagcaatctacctctcacaatatttaatcccaaactagcgcaaaagttaccttctataacacctctgcgagatgcagctgcagtaaatagcacacgtaatgccctatggcagcaactgatcaagcttttactcccttgtgaggcgggtactggagggcaaacaaaatataatcgcaatcgtttaggaatcccgaaaacacatgctttagatgctgcctgcacaggcaccacttttcagatccaaaattggcaaattcccactctacagatccgttgcaccggaaggggttcttaccaaagaactcgtacagatcgctttggctttcctcgaggatttcttctccgc

SEQ ID NO: 1943 - DNA, 279 bp, Unknown
  Ga0207156_10850 JGI
gtcaactacctctccctaaagggagaagcttgaaagggaactaacaagcttggttgaccagggaaagcggtaaccaacccgctacgttataacaaggtttaagacccactccggagtgcttcctcagctccggactctggaagcagcggttgcagacaaccgattgggtaaggacgaaacggatcgctgcaaatcgccgtgttataacattcccgaggggagcaagccgaaaggctccgttacaaggcccgtaagggcattttttagagaattatggca

SEQ ID NO: 1944 - DNA, 984 bp, Unknown
  Ga0187869_10014458 JGI
atgccatgccaccctgcaagagcaagggaacttgttcgtgcaggaaaggcaaagcgtcggttcaacaagggtctgttctacatcctcctcactaaaaggtcggacggattcaaacagccagtggcacttggaattgatacaggttcgaagtgggaaggtttcacggtcaaatcagaagcccatacttttgagaatctgaacgctgatgcagtcacgtgggtcaaagataaaatagagactcgcaggaatatgcgtcggtcacggcgtaatcgcaaaactccatatcgtcaatgccgttggaatcgttcaaccaaagcgaactacgacggattcagacttgcaccttcgacccatgcacgttgggattggaaactacgtctcgcaaagtggctcagcaagttgtatcccatctcgtgcttcgtcgtagaagacattaaagccgaaactaagaagggctgtaagaagtggaatacctcctttagtccgatagagaatggcaagaagtggttttatcaggaactcggaaagttagggcgtgtagaaaccaagcaaggctatgaaactttcgagatgcgaaatcagatgagtctcaagaaactaaaggacaagaagtccaagagtttctatgctcactgcgtagactcgtggactcttgccaactggtttgtcggtggacatacaaagcctgagtttgagcatgtcacttgcgtcactccgtttcagtggaagcgacgacaattgcacaaactccaaaagtctgctggtggtattcgaaagagggagggctctaccaatagtctcggattcaaacgaggcagtttggtcaagcatgtcaaggtaggcttggcttatgttggggggtttatcaaaaacagaatcagtctgcactccgttcagacaggcgaacgtttaggacaaaacttcaaaccagcagattgcaagtttcttgcccacagcagttggagggtttatgcaccagcataa

SEQ ID NO: 1945 - DNA, 240 bp, Unknown
  Ga0187869_10014458 JGI
gtcaataccccacgcctaaaggcgggggcttgaaagtcaaaacctaaccagttctggcaatcaagttaaacgttgtctagacaagtctcgcaatcgaaagattggagcaacaagttgtctgtacgtggtagtacgggttatgtcgaggatgttccgctagtcttcgacctctaagacagcctgtgtcgaagcggttattagccgtccttcgggacgagaaaaacgtaggttaactttatg

SEQ ID NO: 1946 - DNA, 1527 bp, Unknown
  Ga0207639_10055049 JGI
ttgcgttacgcatttgttttagacaaacatcaacagcctctcatgccctgccatccagccagggcaagacaattgttgtcccaaggcaaagcggctgtatttcgtttgcatccctttaccattattctcttggaaagagattctggggaatgttctggccttgatttgaaatacgatccaggcagcaaaacgacaggcgttgttttaaccgttgatcggaaaaaaacaggtccaacggtactttgggcggctgagttacatcatcgtggtcaagcgattatggaaaatttgcgtgctcgcttggccattcgtaggggaagacggcatcgaaaaactcggtatcgagcgcctcgtttccttaatcgttgtcgggcaacgggtaaattagcgccttccctgcaatctagagttgacaatgtgaacaacttaacgctgaaattaagacgaatcgctcccatccatcgtatttggttggaacgagtcaaatttgatacccaaaaactgcaatctccggaagttcatggcattgaatatcaacagggaaccttgtttggttatgaacttcgagaatatcttttggaaaaatggcaacgaaagtgcgcctattgcgatgtgactcaggttcctctggaaatagatcacatggttccccgcgctaagggtggcagtgatcgcgtctcgaatcttaccttagcctgtcggagctgcaaccaaaaaaagggtgcccaaatactcgacttttttctggctaaagaaccggcacgtctgaagaagctcaaaagcacagctcaagctcctctacgagatgctgctgccgtcaacaccacccgaaaagccttacaaaactgcctatctgccttacccataccggtcttgaccgctaccggtgctgaaaccaagtataaccgttgccaacaaggctatcccaaagcacattggattgatgccgcctgcgtgggcagccaagggtattcggtttttttaccgcctcaaattcgtcctctgcaaatccaggccatggggcgaggttcaaggcaaatgtgccgcgtgaataaagcaggcttccccagaacgagcgcaaaatcagccaaacgcgttcaaggttttcaaacaggagattgggtagttgctatggtgcctacaggaaaaaaagcaggtatgcacagaggccgagttgccgttcgggctactggaaatttcaatatcaagacctctttaggggttattcaaggggtatccgcccggtattgtcaggtccagcatcgactggatggatactattatcaatataccgctatagacgcgcttcctccccctgctgaagcagggggtctccgcgcgaggtcttatgaacgaggcgagctagctggctttgctggactccggcgctctacatcctcagcaacagaagccgcaggcggaatgagatccttgtcaggatttgaatcttgcatggcgtttgaatatccaggcaatacgggcctatcaaagcgtctctcttccagatcggcgattggttgcggctga

SEQ ID NO: 1947 - DNA, 345 bp, Unknown
  Ga0207639_10055049 JGI
gtcaactacctcccgttaaagcgggaggcttgcagggaacctttggtaacccgtaagcctctgagttgaccagactcagtccctactctctttgattcttctgggtcagggcggtagggattaccttaaggcagaatctgctctgttcagagcagcgagataggtaccctgggatgcttctccagtcccaggttctacggtttagagttaaacaggcataagaggtggaagccagtgctctaaacaaaaacctgccattaagtttgtcgaggagaccgttacctgcgaaagcagagcgcctggtaacaggcacttttttagaaggagttaagcccattgcgttac

SEQ ID NO: 1948 - DNA, 1056 bp, Unknown
  Ga0315282_10012226 JGI
atgcactaccgcaggaaaaggttcaacaaccgaaagcgatctaaaaactggcttgctccaacgctaaggagcaaaaaagatgctatagtcaatgctgtaaagcggatagcaaagatacttcccgtaaagaaagtaacgattgaaacagcttcttttgacactcaggcaataaaaacaggacataagataccgaactggttataccagaaaggtccgctatacgatgaagagaacataaaagcatacgtaaggaagagggatgattatacctgccaatattgtggccaagaccttcacggcaaacgttgtgaagtagaccacataaagccgaagtcaagaggcggcacagatgtacctgacaatatggtggcatcttgtgaagactgcaataaaagtaaggataatttgactctggacgaatgggtaaagttattggaggctcatccaacggaaatcaacaaaaagcgattaaggcgggtaccgaagataagagagcaggtaaaaatatcgctggtaggatccgcccatgtccaaagtatgaagaatgcattggttaaggaaataagcgaacattttccagttcaagagaccaacggtgttactactaaactgatgcgggaaagcataaacctacctaaaacacactgcaatgatgcgatagcgatagcattggacacgtctaaagaaatagtaccgcttgacctaatgtatcgaataaagcaggttaggaagaaaaatcgcagtcttcatgaagcaatacccaggaaagggaggggcaagcctaatagagaggccaagcgcaacaggaagaacataaaagagattgtgataaacaacaagaaatggtgcctatgggacaaagtatatataccacagaaaggtaagattggatatataatcggctttacaggcaagtgggtatatatccaggacataggcggtagatacatccaattatcatccaaatacaaacagatcaatccgaaagaggtaaaactgatatgcaggaacaacaattatgttatagaaaatatgtcgctttcatctctccaatga

SEQ ID NO: 1949 - DNA, 245 bp, Unknown
  Ga0315282_10012226 JGI
gtcaactacccgcctctaaagaggcaggcttgaaaaagcctcaagttgactagcctcagccagggcagaaatgccatcgggctacgttatccgtgttatgatacctttagatgataccctagtctgaagctctatcacctataatccaaacagttccaggggtagggacagtgatatgggcatgtaagcatggataacattggcgaagggcaaataactcccgaaaggagatacactggatgtta

SEQ ID NO: 1950 - DNA, 1362 bp, Unknown
  Ga0395714_000473 JGI
atgcagaagtttaaagtaaagttaaagaacgtacctacagatactccacaagtctgtagctctacaaattctgtattaaacaaagaccaaagtcttagtgtacaggataaagtactgactttaaacaacctcgatgtggatctactccaacataagggaggacagggcttgagagttcctgttattgcttatgtacttaatcaacggggtaattcgttgatgccttgctctgcaaggaaagcaagattacttctaaaaaggagagatgcccatgtcgtaaaaactaatccattttttgttattcagttaaatcgcgcaagtggagaacaagtccaagaatgttcacttggtatcgattcaggttctaagaatatcggattttcggttattacaaacaaaaaagaaattgacagtggtacattgattttagataataaaacatccgacagactcactgaacgcgcaatgtaccgaagaggacgtagaaataaattgtggtatcgtaaaccaagatttaataatagaaagatagagaaaggttggctaccaccgtctgcacagagaaagtttgatactcatattacattaataaataaacttaaaaagttattaccaatcaaaaatattacaattgaagttggtaattttgatattcaaaagatagaaaatccagatattgcaggtatacaatatcaacaaggttcaatgtttgaatatcaaaatatgagaagtttcttgttagcaagagaacaaggtaaatgtcaattgtgcaataaagagtttagtaaaggtaattcttcgcacattcaccatataatacaaaaaagtaaaggcggtactgatagggaaaagaatttagcattacttcacgaatcttgtcataaaaaattacataaaaaccgatcttttagtttgctgaaaaagaataaacaatataaagatacaacatttatgaatataattcgatggagatttagaaaaatatttcctgattgcaaattaacttatggtaatgaaacattcgttaaaagaaataatttgagattagaaaagactcattacaatgatgcctttgttatcgctggtggaaatagtcaaactaaagttcaacctattattttaaaacaaaaacataaaaataacagagttcttcaacttaatagaaaaggctttaaaccatcaataagaaggcagaggtattctattcaacccggagatataatttggataaaagataaaaaatatattgttaagggttgtcattgttatggaaaatggatcctttgtacaaataatattaaaaattttgattttagtattaaaaaagtagaaaatgtttttcatacacaatcaatctattaa

SEQ ID NO: 1951 - DNA, 268 bp, Unknown
  Ga0395714_000473 JGI
gtcaactacctacttctaaagaagtaggcttgaatcgtgaggttcaacgtaagagttgattagagggcaaaggttaaatcttatgcagaagtttaaagtaaagttaaagaacgtacctacagatactccacaagtctgtagctctacaaattctgtattaaacaaagaccaaagtcttagtgtacaggataaagtactgactttaaacaacctcgatgtggatctactccaacataagggaggacagggcttgagagttcctgttatt

SEQ ID NO: 1952 - DNA, 1281 bp, Unknown
  Ga0137369_10007808 JGI
gtggttttcgttctctcaagtgacggccagccgcttgacccgtgccacgaggcgcgggcgaggaagctgctggcagcgggagaagccgtcgagtatcgccgttatccctataccattcggctgctccaccgcagagcagccgaatcgacgacgcacccgcaccggctcaagctcgatccgggcagcaaaacgaccggcctcgccatcgtgcaagaggatcagccccgcgtggtgtgggctgccgaactcgcccatcgcggccagcagatacgcgatgcactcttggcccggcgggcgctccgccgcagccggagacaacgcaaaacgcgttaccggcctgcacggtttctcaaccggcggcgcaaagacggctggctccctccatcgcttctgcatcgagtgctgactacgctgacctgggcaagaaggctgcggcggttgtgtccgatcggtgccatcagcatggagttggtgcgcttcgacacccaggcgctccaaaatcctgaaatcgcaggagtggcataccagcgcggcacattattcggctgggaggtctggaattacctgctgatgaagtggggccatcgctgcgcctactgcggcgcgactaacatgcggctggagcaggagcacctgatcccccgcacccggggtggcagcgaccgcatcacgaacctcaccatcgcctgccggccctgcaacgagcgcaaaggcaacctgactgccatcgagttcggctttccgcagcttatggcccaggcgaagcggccgctcaaagatgtcgctgcggtgaacagcgcgcggtgggcactctatcagcgcctactagcgacggggctgcccgtcgaggtgggcactggcggcaggacgaagtggaatcgcgcccggctcggctgggacaagagccattggcgtgatgcggcagtggtgggagcgagtacgccggacacgctccacgtggcggtaggaagcgtgctgctcatcgccgctacaggccatggccgccgccagatgtgccggacaaacaagtatggcttccccacgcgccatgtaccgcgccggaaacgccaccttggcttcaaaacgggcgatctggtgcgtgcggtactcccgagcggaaagcacgtaggaacgcacgtcgggcgggtcgccattcgcagtacgggcaagttcaatattgctacgcctgctggattggtacaaggcatccaccaccgtcattgtcagatcatccagcgtgccgacgggtacgcctatggctatcgaaaggagagcgcgtaa

SEQ ID NO: 1953 - DNA, 274 bp, Unknown
  Ga0137369_10007808 JGI
attgttgtcaggaaccgcacggctcttgccggcggcttgcgatccgtcgtaagcccgtcctgaccagccccagctcgggcaaccgagctacgcccgtcgagtcacgacacctccggctgcgcgggccaggccggagccctgtcgcctgtcagaacgttcgcctggggcaaaggcggcatctggcgggcgcgacaagctcgacgcgcatgggcgaggcccactctaaccgccgcaaggcgagatgcacccgtaaggggcaaaggtatcatttgtg

SEQ ID NO: 1954 - DNA, 972 bp, Unknown
  human gut metagenome genome assembly, contig: NODE_4586_length_3121_cov_1.805284, whole genome shotgun sequence WGS
gtgtgtcttattgcaaacctcttattaacattggcgaaggtgtcatatacggctcgatatgtgccggcttaccgctttaagcatatcacaaaaaaggaggtgccttatatggtatatgtattagatatcgatggacagccacttatgccaacttcaaggcacggaaaagtaagaaggctgttgaatagtcatcttgctaaagtagtaaagcgttgtccatttacgatacagcttttatatcaaagtacaaaagaaacacagcctgtatctcttggtgtagacgcaggaagtagacatgttggtctgtctgctacaacagagcgggaagttgtctatcaggaagaacttgttcctcgcaatgatattgtaaaactgttatcagcaagacgagcattgcgccgttctcgaaggaatcgaaagacgagatacagaagggttagattcaacaatcgtgtgcattctaaacacaaaggatggctggctccatctgtagaagtcaagatacaggagcacatcacagccaccaagagaatctgtcaaattctgcctatatttgatattcatgtagaaacagcagaattcgatcttcagcgtctaaaagcgatggaagaaggaaggctacttcctgctggtacagattatcagcttggggaacagtacgatttctataacacaagacagtatgtgcttcatcgagatgaatatacttgtcagtgttgtggtacgcatgataacaatgtaaaactacatgtgcatcatgtcgaaagccgtcagacaggtggagaggcacctaacaatctgattacactttgtgagcactgtcataaatcgatacatgccgggaagatgatgctgccaaaaggcaagaaacgaggcaagtcctatcgtgatgctgcttttatgggtatcatgcgtaatactctgctagaacgtttaagaaaagaagtaaatgttccagtgacgatgacatat

SEQ ID NO: 1955 - DNA, 276 bp, Unknown
  human gut metagenome genome assembly, contig: NODE_4586_length_3121_cov_1.805284, whole genome shotgun sequence WGS
gtcaactacccgccaatgaattggcaggcttgtaaaagcctaagttgactagcctaagtgttttgagcactacgttaagagagaatatatagttacccgtggatgtaacacctagtctgcggctctaagaagatacattaaaaagttctgtagggtaggaactgtgtgtgtcttattgcaaacctcttattaacattggcgaaggtgtcatatacggctcgatatgtgccggcttaccgctttaagcatatcacaaaaaaggaggtgccttatatg

SEQ ID NO: 1956 - DNA, 1467 bp, Unknown
  human gut metagenome genome assembly, contig: NODE_15547_length_4308_cov_2.449800, whole genome shotgun sequence WGS
atggtacggctgtctgacgggaggcgtaagccggaaaggaaacttatggtagcagttgtcacgaacactgggaagcccctgatgccgaccagtacataccgggcacggaagctcttaaagggcggacgtgccgtgatctataaataccgtccttactttaccatcatgctcgtggaccgggcagaaggggaagtacaggatatcgagtacaagtctgataccggctccaaacatgccgggatcagtgcctgtacagagaaacaggaacttttaagcgaacagcgtgaccttccggataaggagccggaacaccacaaagaacagcagcgttaccgccgcgggagaaggaacaggaaacggtaccggaagccgaagttcgataaccggaagaagaaaccgcaggaaggccatgaaaaatggctggcaccgacaaacctccacaagctggagatccaggtaaacctgttcaaagacttctgccaggtagttccggtaacctctgcttactttgaaatgggaaagtttgatacccaggtactgaaagcagtcctggaaggaagaccaataccacagggtgaagattaccagagaggggagcagtacgggacggatacgttacgtgctgccgtcttcctcagggatgactacacctgcaggatctgcgggcggaccattaaggacggtgccatcctccatgtacaccatgtggggtactggatgcaggaccggaccaaccgccctgcaaaccttgccacggtatgtgagcagtgccatacgcctgcgaaccatggcaggaacgggatcctgtatggaaggaaacctgagcatgggactttaaaggatgcctcctatatgacatcggtccgctggatcatgctgaaggaattaaaggatgccgccccggaagtgagtatccatgttacctatggggtcaccacaaagaggaagcgccagggcctgcaccttccaaagagccatgtcaacgatgccttttccatggggcggttccatccaaagaaacgggcggatactgcttactggaagaagaccatccggcatgaccgttccctgcagaagttctatgatgccgtatacctggataccagggacggcagagagaaaaagggcagtgaactttccaacggaaggatcagccggaaccacaaaaaggacagtgagaacctgcataagtaccgcgggcacaaggtgtcaaaaggccatgtttccatccgcagggacgggaacaaactgaagcctggaagcgttgtcctctataacggggaaaggctgacggtacacggcactcatacatcctacaggaaaaataaaaagggcgaagaggtcaagaacgtcaatgtccagtttacaagaccggcatctgacggaaagaagtctgcttcactgaaaaaatgtaagatcgtaacaaggaactataacacgggctggaaacgataccggcctgcataa

SEQ ID NO: 1957 - DNA, 375 bp, Unknown
  human gut metagenome genome assembly, contig: NODE_15547_length_4308_cov_2.449800, whole genome shotgun sequence WGS
gtcaattacccacggtcatatcctgacggaatggccggggcttgctgatggaaggtaactttttgccggatatctgccagcccggttgattactctaagccggtccggtaagtcttttttgatactgccgggtaacggctacgttacactggaatatacaggcaccaggggatctttcttcaagtccctgctctgcgggctgtctgttaaacatccctttttgggtacggggaagtgcgtcagccgccaaaaccctttgtaacattgaggttggagaacacttgctatgtaaagaagccgcaggacacaggcagctgggaggctgccgccgtacatggtacggctgtctgacgggaggcgtaagccggaaaggaa

SEQ ID NO: 1958 - DNA, 1224 bp, Succinivibrio dextrinosolvens
atggtttatgttttaaattgcgaaggtgtaccaatcatgccgactactcggcacggtatggtaagacgtttgctcaaagaacataaagcaaaggtagttaaaagatgtccatttacaattcagcttagatatgagtgtgcaaacattacccaatctatcacacttggtgtagacacgggatatgaaaatgttggtatttctgcatgtactgagaaaaaggttctttttgaagctaaagctaaaatcagaactgatatggtaaagctcttgtctacaagaagagaaacaagacgtactcgtagatcaagaaaaacaagatatcgcaaagctcgtttttttaaccgaagtattgaaaaaggttggctacctccatctatcagagctaaagtagaatctcatttaagattagttgcaaaggttcacgaaattttgcctatagacaaaattgtcgtagagattgcaagttttgacattcagaaaatcaaaaatcctgatatcaaaagtgctgagtatcagcaaggtgatcaattaggattcaagaatatgaaagcttatgtcttatgtagagatagatgtacttgtagatgttgcaaaggtaagtctaaagacaaaattttgcgagttcaccatcttgaatcaagacttataggtggtgatgctcctaacaatctcgtgactttgtgcaattcgtgtcacacgaaatttcacaaaggtttgatttctttagatgacattaaaagaggaaaatctttcaaagctgaaactttcatgggattgatgcgaaatttctttttcaaagaactttgcgataaatatccatgtgttaaatgcacctatggttacataaccaagcatttaagagagaaatatcatttaaagaaagatcatcatgccgatgctcggtgcatttgcggtacaccgcaagctttaccaagtgatgtctatctgatgaaaaaggtaagatgtcataatcgacagactcataagtttactaccttaaaaggaggtcgaagaaagttgaatcaagcaccgtatacggtaaaaggtttcaggcttttcgacaaggttaaagttggcgatcaaattggatttatttttggaagaagaacaagtggacagtttgatatacgcaccgtatacggtgaacgtatcaatggatcaataagttataaaagacttcaattgattgaaactagaaaaagttggttaattgaaaaatgttaa

SEQ ID NO: 1959 - DNA, 359 bp, Succinivibrio dextrinosolvens
ctctgcagacagtattgatgatattttcattatagatatcatgagagagaatattaaaaagctctgatgtagatgagtattgatatacggaatctgcaactaaagcttagtctcagcaaaatttactttcaaaagtagattaagctacgttatgaaagaatagataacaatctaaatagttacgtcagaatgttctacctagttctgacctctaaggtctatgattaaacagttttcattgaaaacagagttgtagacaacaaacctttcaataacattgacgaaggtagcattttacagttttgcaggatctggcttacagcaaaaaaactgcaactttttaaaggaattaaattatg

SEQ ID NO: 1960 - DNA, 948 bp, Unknown
  Ga0311329_10041539 JGI
atgccgtgtactccgaagcgagcgcgcaagctgctcgaagcgggtcgtgcacgcgtacatcagctgattccgtttgctattcgactcactgaccgtgttgcacaaacatctaactttcagcccttaaaaataaagctggacccaggtagtaaggcatcaggattagccgtttgtcgtgtgtcagaaaaaacggatggcgacggtgttgttcaaccgacgatgcatatcctgtttttaatggaactggtgcaccgaggcgcagcaattaaaaaatcattgcaggctcgagcagcaatgcgtggacgtcgtaggggtaatctgcgctatcgcgcgccgcggttcaataaccgcacgaaatcgaaaggatggctgccgccttcccttcaacatcgggttgacaccttatcttcttgggttaaccgaataggcaggttggcgcccattactcatctagcccaagaactggtgcgattcgatatgcaactgatgcaaaacgccgaaatatccggagtggcctaccaacaaggcgagctggcaggctacgaagtacgcgaatacctgctagctaaattcaaccgaacttgtgcctattgcgatgcaacggaggtaccgctgcagatagagcatatccaagcaaaagcaaacgcagggtctaatcgggtcagtaacttaacgctcgcctgcaagaagtgtaatcaggcaaaaggttccttggatattcggacctttttagccaaagacccggcacgtctggcgcgaatactaaagcaggttaaagcaccgttacgagacgccgcggccgtaaatgcaacgcgctgggccgtctttaacatgctaaaacaaaccggtcttccggtcgaaaccggcagcggcggtcaaactaaatacaatcgcactcgcttaggcgtgattaaaacgcatgctttggatgcggcttgtgtgggacaa

SEQ ID NO: 1961 - DNA, 376 bp, Unknown
  Ga0311329_10041539 JGI
gtcaactaccccgccctaaaggatggagcttgaaaagcgaaagccgattaagctcaggttgacccgagaaaggattgagtaacggaagttactgagtactacgttgtaagtaggtacaaaaccgacgccgggatgcttttccagttccggatagaaattcgtaagagtttccttcgaagttgcggtagcagacaagctacagggtatgcacgaaacggaccgcaacaaaacagcaaggtatcgctgttgaagccggcttacaacattctcaaggaaagcgggaccggaaggtctccgtcacaaggcgcgtaagcgcactgttttaccaataagaagtgattttacttaacgaaagaaagaacgcaattacgtgaaa

SEQ ID NO: 1962 - DNA, 1272 bp, Unknown
  Ga0210051_1023303 JGI
atgaaaaatacacaacagaagttaggaaagagaaatacatacacacctacaaatacttcacaagtttgtagctctgtggttgtgtctttaaacagagaggaaactctcagtgagcatggcttaaaaacctttccaaacagcctcgatgtgaacaaacagtctggcaagactggacaggatttgagaattcctgttttaaatatacgtggaaaacctttgatgccaacaacaccagcaaaagcaaggcatttgttagaacaaagaaaagcaaaagtaatcaaaagaaaaccatttgttatacaattgacaatagcaacgggagagactaagcaaaagattacattaggaatagatagcggatatagtcaagtaggattcagcgcaaagacagaaaaagaagaattgatattaggagaactaactttaagaaaagatgtatccaaaaagttagaagaaagaaaaaggtatagaaaacagaagagaaataagttatggtacagagaagcaagatttgataaccgagtaatttcaaaagaattgttagcaccaagcatacagcacaaattggatacacatgttagattgattgaaaaaatcaaaagtttacttccaatcacaaaaacaataattgaaatagccaactttgatacacagaagatgcagaatccagaaatatcaggaataaaatatcaacaaggtgaattacaagggtatcatatacgagaatatcttttagacaagtttggcaggaaatgtgcttattgcaatcaaaagggtgttcctttagaggttgaacatattattccaaaatcaaaaggaggaagtaacagagcatctaaccttacaatctcatgcagtaaatgcaatttagaaaaaggtacattaacagtagaagagtttggtttccataacattcaaaaattagcaaaacaatccttaaaagcaacagcatttatgaatgttgtaaggaagagactgactaggcaggtaaatgcagatgaaacatttggctatatcacaaaatatagaaggattagatataacttaaacaaaagtcatgtcaacgatgcttttgtgattgctgagggaagtaatcaggcaagatgtcaaccatccattgtaacacaaataagaaggaataatagatgtttacaaatgaatagggatggatacaaaccatcaataagaatacagagatacaaattacaacctaatgatttagtaagatataatggtcaatcacaaaaaatcaaaggagtattcaattatgga

SEQ ID NO: 1963 - DNA, 279 bp, Unknown; identical to SEQ ID NO: 1486
  Ga0210051_1023303 JGI

SEQ ID NO: 1964 - DNA, 1257 bp, Unknown
  Ga0307377_10002004 JGI
atggcgacaacagcaagaagggcaaggttacttttaaaagaaggcaaggcaacagtaatcaaccgtacaccatttattatacgtttacttattgctacaggagaaacaaagcaaccaataatattaggtgtagatgcaggtagcaagacaattggattatcagctactatagaaaacgaagaactgttctctgcagaggttcagctaaggactgatattgtagaattattatctacaagaatggaaaacaggtgtaccagaagggctagattgaggcatagggaaccaagatttttaaatcgagttaagggtaaaaataagggttggcttgcaccgagtatagagaacaggattcagacacacctaaaaatggtggatagagtatgtagtattcttccaatatcaaagattattgttgaaacagcatcctttgatatacagaagattaagaatccagttatcgaaggtactggataccagcaaggagagcaactagacttttggaatgttcgtgagtatgttctgtttagggatagacaccaacgtaagggtaaaaagggatgcaagtgtaaaattctcaatgtgcatcacattgagagccgtaaaactggtggagatgcaccaaataacttgattaccttatgtgaggattgccatgacgattatcacaatggcaagttgaaattaaacatcaagcgtggtaattcatttagggatgttgctttcatgggtattatgcgttgggcattttataacagacttaaagagaaatattccaatgtacaaaacacatttggatatataacgaaaaacacacgcataactaacaatttaccaaaagagcatagaatagatgctttgtgtataacgagtaatcctttggtaataaggtgtagcgattggtatttgttaaaacaagtacggaaacacaatcgccagatacacaagtcaaatattctcaggggcggagtaaagaaactcaatcaagcaccatacctagttaagggttttagattatttgacaaggtgaattacaaaaatcaagaatgctttatctttggtagaagagctacgggctatttcgacttgcgtaagttagacggtacagttattcacagaagtgcaagctataaagatttagaattattagaaataagaaaaagtctattaacagaaaggaggaagcaggagcaaggaatgagtgagcattcctccacgaacctaaaagtatcgtggtttcctgccaagtttttatga

SEQ ID NO: 1965 - DNA, 239 bp, Unknown
  Ga0307377_10002004 JGI
gtcaattaccactaccctaaagggatagtggcttgtaggaaactacaaaccataagttgactagactaagcgaaagctacgttatataagccatcatacccgtggatgtaaatcttagtctgcggctctatggtttaacattaaacaatcctgtgtggtaggggtcgtgtgttgagcataacaaacttatataacattgtctaaggattataactctgtaaggaggacgtaacttgaga

SEQ ID NO: 1966 - DNA, 1104 bp, Unknown
  Ga0182238_1001861 JGI
atgcaacatcaaagagtctttgttctggacacgaaccgtaaaccgctcatgccctgtcatccggccagggcacggcggctgctaaagacaggccgtgcatcggtgtttcgtaaaacacccttcaccatcatcattcatgacagggacggaggcgaaacccaggacacagaactgcggatagatcccggttccaaggctaccggttgtgctttggtggtcagcggccacaacggggaccgggctgtggccgggatcgagattgggcacagaagccagcaaataaagcagaacctggaaaaacgccggggtgtgcgtagaagtaggcgcaaccgcaaaactcggtatcgtgccccacgctttaacaaccggcttcgcccaaagaactggtttccgcctagccttcaaagccgggtggagcatgtgcggacctgggcgaatcgtttctgcaaattatctccggtatcgagcattgccgtggagacggtgcgctttgatacacagaagatgcaaaacccggaaatatccggggtggagtatcagcaaggggagcttttcggctacgaggtccgggagtaccttttggagaagtggggacgaaaatgcgcctattgcggcaaggaaaatacacctttggaggtagagcacattgtgcccaagtccaggggcgggagtaaccgggtgtccaacctcaccctgtcctgcacggactgcaaccaagacaaagggaacaggactgcggctgagtacggtttccccaagatccaggcccaggccaaagctcccctgcgggacgctgcggcggtaaacgctacccggtacgccatcgggaatatgctaaaaggtttgggcctcccggtatccttttggtctggaggtaggactaagaagaatcggatcgggcagggatttgagaaggcccattggatagatgccgcttgcgtagggaagaaagggggaacggtctatattccaaggataattcctcttgtggccaaagctatggggcatgggagtaggcagttttgtcgggtggaaggcatatcctggaagtattgttctattttgcagcaagcagacgggtataccttttccttcccggcctga

SEQ ID NO: 1967 - DNA, 265 bp, Unknown
  Ga0182238_1001861 JGI
gtcatctaccccgccctaaagggcggagcttgtaagctctgaagatgaccagccttagtcacattaaaagtgtgactacgttgggagcgaatatataggcactccgggatgccccgctagtcccggacactgcggcaaacggttaaacaggcatacggggttgaagccagtgccgtttgcaataaaccgctctacaacattggcgaagcggacgtaaccggcctttgagccgagaaaactaaggtaactcatgcaacatcaaaga

SEQ ID NO: 1968 - DNA, 702 bp, Unknown
  human gut metagenome genome assembly, contig: NODE_3471_length_5924_cov_5.665020, whole genome shotgun sequence WGS
atgtcaacaacagttttcgtattggacaagaagcaccggcccctgatgccgtgccgcccggcaagggcgagacggcttctgcgggcgggccgcgcacgggtggtgaagcgcttccccttcgtcatccggctcgtggaccgcactgtggagcagtccgaggttcaacccgtgctcatcaagctcgatcccggctcaagggagacgggcgccgccgtcgtgcgggatgacgggaagaagcggcatcatgcgctcgcgttcttcgtcatcaagcatcggggcggcgccatccgcgacgcgctcaaggcgcgaagcgcatttcgtcgccgccgcaggtcgcagaatttccgctgtcggtcgccgcgctttctgaaccgcgtcaagcccaaggggtggctcccgccttctctgcggcaccgcgtggaaacgaccctttcgttcgtgaggaggatgtgccggtacctgccggtaagcggcatcgcgacggagttggtgaagttcgattcgcaaaagctccagaacccggaggtctcgggggtcaagtatcagcagggcacgctctttgagtatgaggtgcgcgaataccttcttgagaagttcggccggaagtgcgtctattgcggcgccgaaggcgtgccgctcaacatcgaccatgtggttccccgcgccaagggcggctccaaccgggtctccaacttggtgctc

SEQ ID NO: 1969 - DNA, 293 bp, Unknown
  human gut metagenome genome assembly, contig: NODE_3471_length_5924_cov_5.665020, whole genome shotgun sequence WGS
gtcaactaccccggcctaaaggccgaggcttgtgaaagcaggtctggttgaccagcctaagtttttcgagaactacgttgcagacaggttcaagacccacctcggaatgcttcctcagttccgagctctggaagcctcagaagcagacaagcattgggtacgcacgaaacggtctgaggcaaaatgccggtctgttcaacattggcgaggggaattgctccgcccgcaagggcggagcatgtcacgggcatcagcccgaagaatcgtaaggttcatttttcatgtcaacaaca

SEQ ID NO: 1970 - DNA, 1101 bp, Richelia sp. UBA3308
atgcgtgtacctgtaattaactacgacagcgagccgttaatgcctaccaaacgaagtcgcgctcgacgttggataaaagaaggtaaagctataggcaaatggtctaaactaggcattttctacattcaattattaacacccgctagtggggataaagcccaagatattgctgttggaatcgacccaggcaaacaatttaccgggatcgcagttttatctcacaaaagcactttactgactattcacgttgatttaccctttaaaaatataactaaaagaatggctcaacgtgccatgatgcgacgttgtagaagaggtagaagaattaacaaaaaaataccctttaaccaacgtagtcatcgtcaaactagattcgataaccgtagacagaaaaaattacccccaagcataaacgcgaataaacaactagaaagacgaatactaggattaataattaagttatttccagtatcaaaggttgtttacgaagttgtaaaagcgtcggggaacaaagggtttagtccggtcatggtaggtcaaatagaccaatgcaaaaaattaagtaagcttgattatttatttgatttcaaaactcttcaaggttacgaaacttatcaaatccgcgaacacttaaagcttgaaaaagagaaaagtgataagtctttaaaaattcctcaaacccatgctgtagatggaattgccttagctgcttctaactggatgaattacggaattgttgacaataattcgatgggatggcgaggagagataaccttaactgattcaatatttctggttatttctagacctcctatcagtcgtagacagttacatttaatggttccaaacaaaggaggtaaaagacgtaaatatggtggtagtgttacacagcacggatatcgtaaaggtgataatgtcgaagctgttaaagctaataaaacttaccgtggatgggtaagtggagatactaatacccaagtttctgttagtaatgcaaactggaaacggcttggacagttctctaaaaataaagtgcgattaattcgacgttctactggtttaatcatcacatctcgaaaatatctagctaaaggcacttaa

SEQ ID NO: 1971 - DNA, 214 bp, Richelia sp. UBA3308
gtcagtaactcccggctaaaagccgggagcttgcaagaaccaaattttgcgtgtctgactagcccgtgagccatcaatcggtaaagacttccggatgcttccccagtccggattatctctaaaactgtttggtcagttgcttgtagaaaggacatcttattgatggtgggcgaggggacttaaactttacacgaaggattatctctttatgcgt

SEQ ID NO: 1972 - DNA, 1344 bp, Unknown
  Ga0119972_1000501 JGI
atgtctaactttgtatttgttttagataccaataaacaacctctagaaccctgttcgccaacaatagctaaaaagctactaaaagcaggtaaagctgctgtattcagacagtatccgtttacaatcattcttaagaaagtagtagatggaaaggatgtccaacaatgtcaacttaaactagatccaggttctaagactactggaatagcaatacttcaaggaaataaactaatctgggcagcagaacttactcatcgaggtcaacaaattaaagacgaccttgaatcccgtcgatctttaagacgtggacgcagaggaagaaaaactagatatagacaaccccgatttctgaatcgaaccagagccaagggttggttgccaccaagtttagaacatcgcgttttaacttgccagacttgggttgaacgattgattaggctctgtcccattagctctatagctatggaattagttaggtttgatactcaaaagatgcagaaccctgaaatgtcaggcactgaatatcaacaaggtactctttatcaatacgaagtacgagaatatttactagaaaaatttaaccgaacctgtgcttattgtggggcaaaaaatacacctttagaagtagaacatattgttgccttatctaaaggtgggtctaaccgagtatctaacctaactattgcttgtgtaccttgtaaccaatctaaatctaatcttgatattaaaaagtttctagccgacaaaccatcagttctcaaaaaggttttagctacagctaaagccccgcttaaagatgctgctgcggttaattcaacacgctggaaattgtttaatagcttaaaagaaactggtttaccaataattactggtacaggtagtcagactaagttcaaccgaactcaacaaggactcaaaaaaactcattgggtagatgctgcttgcgtcgggaatactccaaaacttgaaatattaaccagtctaccattacgggttcaatgcgctggttatggtaacagacaagtaatccatgttgataaatatggttttcctagaagaagcaaatctggaagtttggtcagaaaatctgctcgagttaaacaagttaaaggtttccagactggagatatcgtcaaagcagtggttatcaaaggcaagaaaatcggttcttatttgggcaaagtagctgttcgctcaagtggttcatttaatatcaaaactgtttcagaaacagtacaaggcattagttacaaatactgtaaacaaattcatcgtaaagatggctatgtttatgggtttcacggacagttaaaactgtcccacgattgttcctccgcgctttaa

SEQ ID NO: 1973 - DNA, 269 bp, Unknown
  Ga0119972_1000501 JGI
gtcagaaatctcgtagaaagtaactccgctttaaaaagacggagcttgcaaacctagtatctgaccagtcctagtctttcacagactacgttaacggcaagagttaaagacctaccttggagtgcgtgccagctcgaagctcctagaaccaaaaagttaaacagacttatcgagattaaatcagtgctttttggatagtaccgaccgttaacttggacgaggcaaacattatcctttattggagaaaagacgcaaaaatgtctaacttt

SEQ ID NO: 1974 - DNA, 1392 bp, Unknown
  SL_8KL_010_SEDDRAFT_10003558 JGI
atgtttaaaaaaacgttacaagtaaagttaaagaacacacttcaggatgctccactagtcctgaaccctgtaagttctgtattaaacagagaggaaactctcagtgtacaggacaaagtactggcttgtaacagtcccgaagtggatctactccaacatacaggagatcagaacttgagagtctctgatactgtgtatgtattaaacataaaaggatttcccttgatgcctactttttgtagaaaagccagactactgttaaaaacagggaaagcagtagttgtcagtagattcccttttactatacagttaacgtatcagacaggagaaaataaacaagaaattactttaggagttgatcctggatacaagaatgtaggattttcttgtattacagaaacaaaagagttgatttgtggaacagttgagttagataataatacttcaggcagattgacagaacgtagttcttacagaagaaacagacggaacaaattgaggtatcgtgaacctagatttaacaatagaataaggaagttgggatggcttcccccttcagtagaaagaagatatcaaactcatttgtctatagtgaataagttaagaaaaatattacctattcataagattattgttgaatcttgtaattttgatatacagaaacttaataatcctgaaattaaaggaaaagagtatcaagaagggaatctgttaggctattttaattctaaatcatatattttatcaagggagaatcattgttgtcagttgtgtggtaaatctgattctaaaacagatagttggagactgcatcacattattgagaggtctaaaggtggaaccgataaaccagataacttagctttgttacataaatcttgtcataaaagactacataaacaaggtttaaaacttaagaagaataaacaatataaagattctacttttatgaatattattaagaatagattacaaaaagaattaaattgtgatacaacttttggatatattacgcattttaaaagaaatgagttagaactagaaaaaactcattttaatgatgcttttattatagcaggtggaatttgtcagaaaagaatttctgattgttttgtagttcaaaaaaggaaaaataatagaagtatccagttaaacaggaaaggttttaaaccttcaattaggaaacagcgatataagttacaacctaaagatttagtaaaagttttagataggatttttgaagtagttggaacacattgtagaggtaaaaatgttgtgttaaaaaataatggaaagaatgttagtatttctattaagaagataagttggtattttaatgttaaaactttaatttggaatatgggaggaagtgtcaattcctctccctgctaa

SEQ ID NO: 1975 - DNA, 271 bp, Unknown
  SL_8KL_010_SEDDRAFT_10003558 JGI
gtcaactacctgaagctaaagcattcaggcttgaatagtgatattcaacgtaagagttgattagggaaaattttaaattatgtttaaaaaaacgttacaagtaaagttaaagaacacacttcaggatgctccactagtcctgaaccctgtaagttctgtattaaacagagaggaaactctcagtgtacaggacaaagtactggcttgtaacagtcccgaagtggatctactccaacatacaggagatcagaacttgagagtctctgatact

SEQ ID NO: 1976 - DNA, 822 bp, Unknown
  Ga0255345_1030292 JGI
atggtatatgtaattagcatcactggtaaagtattaatgccaacgtcaaatgcgaaagctagaatattactcaaacaaggtaaagcaaaagtggttacgattagaccgtttactattcaattgacctataagacgacggaatatacgcaaccaataacattggggattgatagcggttatttgaatattggtttcagtgcggtcactgaaaagaaagaattgattggtggtgaagttaaacttcttcaaaacatgagtcaacgaattcaagatagagctatgtatagaaccactcgaagacagaggttgagatatcgtaaaccacgtttcaataataggaaaaaagaaaaaggttggttagcaccaagcattcaacacaaattgaatagccacattagatttgttgagaagttgaagaaaattttgcctatcacgaaagtgatagttgaagtagcaagttttgatattcagaaaattatgaatccagatattcaaggtaaagaatatcaacaaggtgagcaactaggttattataatgttagagaatatgtatttcatagagacaatcacacatgtcagaatccgaattgtaagaataaagatgtggaaaagtatcttcaaacacatcacattgtatttagaagtaatggaggaacagatagacctaataatttaattactctttgttcacaatgccacacaccagaaaatcatttagaaggcgagtttttatataagtggcaaacagaaaagcctaaacttcgtgattttaaagaagctacatttatgtctattgtaagatggcgtttggttgatttgttg

SEQ ID NO: 1977 - DNA, 258 bp, Unknown
  Ga0255345_1030292 JGI
atcaatagccaactatcctaaagggtagaggtttgtaggggaactacaagctggttgattagcctaagtcttaagtgactacgttatgtgagaatgatatagttaccttggaatgcttcactagttccaagctctaagggtagtgattaaacatctctaatggcaggagaagtgttgctgctaaaaacctcatataacattggcgaagtgaacctaccaccgtaaggtgcgttatatccgaaaggattgatttctatg

SEQ ID NO: 1978 - DNA, 1290 bp, Unknown
  Ga0172372_10005216 JGI
atgactactaattcagtgttcgttttggacactaccaaaaaaccgcttacgccatgctcaccggcacgggcgcgggcattattaagggatggcaaagccgcggtttggcgtaccgcgcctttcacccttattttgaaggttgccatgcccgatgctgtcgtaaaaccgataaccgttaagatcgaccctggcagcaagcaaacaggtttggcgcttgttgatgctgatggccgtgttgtgtttgcagcggtacttgagcatcgtggcaaagccatcaaagcaggacttgagtcccgcaggtcgcttcgccgtggccgtcgcggacgtaacactcgttatcgtgcggcacggtttaacaatcgcattcgtcctgaaggctggttgccaccgagtttgcatcaccgtgtcgaaaccacattgacatgggttaatcgtttcagacgttggtgcggcgttgagaaaatttctgtcgagcgggttaaatttgacatgcaattgatgcgtaaccctgaaatatcaggcgtcgaatatcaacaaggcacgctagccggatatagttgcagagcgtatttgctggaaaaatggcagcgcaaatgtgcttattgcggtgctgaacacgttcccttgcaggttgagcatatccattctaaagccaaaggcggcggcaatgcggtttctaacctggcgttggcttgcgatccttgcaacaagaaaaaaggcacactggatataaccgttttcctgaaaaataaacctgaacaacttaagaaaatcctgtctcaagcgaaacgatcgttaagcgatgcggcgacggttaatgcaacacgtaataagttgtttgtcgaactgctgaacaccggcttacccgttgaagccggaaccggcgcacaaacccaattcaaccgaacccggcgggagtatccgaaggcgcattggatcgacgcggcttgtgtgggtaaatccggagcaactgttacgcttgatcctgatatgaagccgctgcttattaaagccaccggacacggaacacggcaggtggtgcgaactgataaatatggcttccctcgcaataaggccggacgagtcaaacggattcatggctttcaaacaggtgatctggttaagctcaagcaaccgaaaggcaaatacgcgggtgatcatattggacgcttagcgggcattcgcgctacggggcaattcgatattgctgctacggttggtaagataacagcaaaattcagcaatttcacactcattcaaagaggtgatggctatgcttacgcacactga

SEQ ID NO: 1979 - DNA, 320 bp, Unknown
  Ga0172372_10005216 JGI
ttgtctaaattcgattcatcagttgagtgtccggcttgactgatttcaagcgcacgtcctgtgcgctcttatcagtcatttttgtcagtgtgcttacgcctactgatgatgctcaaccaggctcggtctctccaaagagactacgttatttaggtcatgacacctgcaaatgcttcaccagtttgcagctctgtcgttaaccattaaacagcacagaccggaacaatgggcagtgtgattaacatgacaagcctttataactttgccgaggtgacaattacgggtgaaagcccaggagaagttttatgactactaattca

SEQ ID NO: 1980 - DNA, 1020 bp, Unknown
  Ga0334826_004099 JGI
atgatgatgttagtaggtgttgtatataatggaagtgctttgatgccttgttgccctgcaagggcaagaagactcattgcgtccagaaaagcaacacctttcatccataaaggtgtgttctgtatcaggttgaatcagtcaccttctgataataaaatacaacctatatcaatcggggtagaccccggatcaaagaaagaagggatatcaatagtaactgaaaagaaaactgtaattaacattcagttggatgctgtcacttgggttaaggatggtgtagaatcacgaagaaatgctcgcagagcgagaagatttcgtaaaaccccttgtaggaagccaacatcagataattatactcgtgataattggttgcctcctagcacaaaggctcggtggcaatccaaattgaatttgattcgttcgttacatcagatatttcctatgtccatatgtgtagtcgaggatatttgtgctgtcacaaaagaaggacaacctaaatggaataaatctttcagtccaatagaagttggtaaatcatggctttatacacaacttcaaaccgaaggtttcagtgtcgtgttaaagaaaggatttgaaacatccgagttgcgtaaacgactcggactgcataagtccactgataagttatctgataaatgggatgctcattgtgtcgatagttgggtactagctgcatctgcgatgcaaacactcccgttaattgacaagagcatgatattaatcaaaccaatgcaatttcatcgtagacaattgcatgcattccaacccgccaaaggcggggttagaagactatatggatctactagatcaatgggatttcgtagaggatcaatcgtatcacatcctaaattcggaatcgccaccataggtggcaattccaaaaataaattaagtctacactctataaaaacaggtaaaaggttaactcaaaatgctaacatcaaagatgttaaattcaaatcattcaacaattacaacgttttcactccccgaagctaa

SEQ ID NO: 1981 - DNA, 284 bp, Unknown
  Ga0334826_004099 JGI
gtcaatcacccctgaactgaaagattcaggggcttgcgactgggaagattagtcatctttgtaaaagaagcgagatatattgaactgattgaactagcctatgcgagttttgttccgcaaggaacaaaatatagcaaactgaattatctatccgtgacagggtaagacatctactggtgctcgtctagctggtagctctgtgatggtcagtggcgaagatgtatatataccccagtaatgggagtgcccttacgggcaaattttagaaaggaatgatgatgtta

SEQ ID NO: 1982 - DNA, 1287 bp, Unknown
  Ga0310786_10002951 JGI
atggtctatgtactgaacagatacggtaaacctctgatgcctaccacccggtacggcagggtccgccgtctgctcaggaaaggactcgcggtcgttgtcgattaccgtccattcacaatccagcttacttacgacacgccgaacggcgtgcaggaggtcagtctaggcgtagacgcgggaaccaagcacgttggtctctccgccactaccaagaagaaggtgctattcgaagcagaattacttttaaggtcggatatcgtggataagatctccacgcgaagggagttccgtcggaccagaaggaacaggaagactcgctaccgcaagtccaggttcctgaacagggcccgctccaagaagccgggatggcttgcaccttccgtacggcagaaggttgattctcacatctactggatttcgaagatacgcaaattcttgcctatcaagaagataaccgtggaaaccgcgcagtttgatacccagctgatgaaggctcaggaacaggggcttccgttgccacagggcaccgactaccagaagggtgaacagctcggattctggaatgtgcgtgaatacgtgctgttccgggacggccataaatgccagtgctgcaaggggaagtccaaggacagtaaattgcatgtccaccatatcgagagtcggaagacaggcggcgatgcgccgaacaacctcatcaccctgtgctcgaaatgccatgagaagtaccatcttggagaaatcgaactgccgaagaccgcaaagcgtggtacctcgctgcgtgacgcggcacagatgggtatcatgcggaagtccctattcatccggctgaaggaagaaattggaaacgaaattccttgctacgagacgtacggatacatcaccaagaatattcgcaccacggcaggcctaccgaaggaacatgtgaatgatgcccactgcatcagcggcaatcccggtgcatgttctgatggcaagtacttgatcatccgcaagttgcgtgcgaacaacaggcaactgcaccgtgcaaccattatgccgggcggaaagcggagaaacaaccagtcaccccgtgaagtaaggggcttccggctgatggattccgtcaggtatgcatacagggagtgctttctgagcggacgtaggatgtcaggctcgttttccgttgcggatatcaccggaaaagttctggcagattcggtcagttacaagaagctgacattaagacatcacaacaacacttacattatggaggaagcagcgctcctctcacccactaaagatgggtga

SEQ ID NO: 1983 - DNA, 294 bp, Unknown
  Ga0310786_10002951 JGI
atcaactacccacgggctaaagacccgtgagtttggggtaactcaggctcatagttgattagactcagtgatgcaagtagaaatacttgctgaactacgttaggaaggtcacggcaccctgggatgtacggtcaagtcccccgccctgccgagcgtcattaaacagtcctgatgggtagggacagtgtggcgttcatgacaagcctccctaacattgtcgatgaccacccacagggagtaatccctgcattacctattaagttaggttaaaacataaaggataacgactagatg

SEQ ID NO: 1984 - DNA, 1359 bp, Unknown
  Ga0393278_0000470 JGI
atgcagaagttagaaaaaagaaatacatacacacccacaaatacttctctagtttgtggcaactgtgattttttattaaacagagaccaaaatctcagtgtaaaaaattcaaaaactttttctaacaatctcgaagagactcaatcccaacatagagggaaacagggcttgagagttcctgttgttgtctatgtacttaatatgaggggagaacctctaatgccaacaacccctagaaatgcaaagaaatttctaaaagaagaaaaagcaaaggttgttaaacgatgtccttttacaattcaattgctcattcaaacaggagaatcaaaacaagaaattacatgtggaatagattctggttataataagatagggtatgattgtttaacaaagaaaaaagttttaatcaatggtgaattaaaattagatcagggtatgaagaaaagacttgatgaaagaaaaaggtatcgcaaatataaaagaagtaaattgtggtatcgtaaacctagatttttaaacagagcaaaaccaaaaggttggctttcaccatctattcagagaaaatttgatacccacatttctttaattgaaagattaaagaaaatacttcctatcacaagagtggttgtggaagtaggacagtttgatattcagaaaatagataatcctgatatccgagcaatagaatatcaacaagggaatctatataactatacaaatgtaaaaggttatatcttttcaagagaaaatgggacatgccaactgtgtaaaaagaaagacggtaagtttcaattacatcatataactccaagaagcaaaggtggaacagacaggcctagcaatttggctttacttcataaatcttgccatgataaattacataggaaacatttagaacattctttaagtaatagtaggcaacataagaccagttcgtttatgaatattatttgcaaaaaatttaaagatttaaatttcgaaattacatatggatatattacatttgtgaatagaaataatttaaatttagaaaagtcacatgcaaatgatgcttttgtgattgctggtggaacaactcaagagttcactaggccatatctaattattcaaaaaagaaaaaataatcgtagtttgcaaactaatagaaaaggttttaagcccagcatcaggagaagtcattatatttatcaacctcatgatcttgttatgtttaaaggagagatttgtgaagttgttggcacgcatagttatggaaaagcgatattggttaaaaataatttagggcaaaaatttggcgttaggattaaaaaaatagtttctttatttcacacgaatggtttaatatggagatatgagtaa

SEQ ID NO: 1985 - DNA, 264 bp, Unknown
  Ga0393278_0000470 JGI
gtcagatacccatgtgtaaaaccatgggctttgtccgagagggctaagggcaactagatgattagagagcttggaaaggagaacttaccatgcagaagttagaaaaaagaaatacatacacacccacaaatacttctctagtttgtggcaactgtgattttttattaaacagagaccaaaatctcagtgtaaaaaattcaaaaactttttctaacaatctcgaagagactcaatcccaacatagagggaaacagggcttgagag

SEQ ID NO: 1986 - DNA, 1407 bp, Unknown
  Ga0207870_100010 JGI
atgcagcagagagtgttggtcgtaggaagggacagaagtccgctcatgccgtgcagtcccgcccgagcccgaatgcttctgagaggcggtcgggcggcgatcctgcggcggtatcctttcacgatcatgttgagggatagagaaagcggtgaggttcagccggtcgcggtgaagtgcgatcccggttcggagaccacgggcatggccttggtggctgagtttggcaggcgggggccaaccgcggtctgggcagcggagatccaacaccggggcaaacaggtccggaaggcactcatgaaaaggcgggttctccggcgagccaggagaaatcggaagacgcggtaccggaagccgcggttcctgaaccggaatccgcaaaaatgcgacggatgcgggaagaacgctaagcacggcagccggtactgtcgcgcctgcggggcgggagacgggcatgggttccgggacaaacgcttgcccccttctctggaaagccgggtcgaaaacgtcgttacttgggtgaaccgtctctgccgatatgcgccggtttccttgataacggttgaacacgtcaaattcgacacgcagctgctccagaaccccgatatctcgggcgtggaataccaacgaggcacccttttcgggtatgagttgcgggagtacctgctggagaagtttggccgccagtgtgcgtactgtgggggagcatcgggagacgaagtgctgaacatcgaccacgtggtcccgaggtcgcgaggcggcagtgacagggtgagcaacctggcggtggtctgccggacgtgcaacgaggcgaaaggaaaccggatgccggaagaatggctggaggagttacatgcatcggtccggccgcttgatctcattcgggcgcagcgttttcccgaagcgctgaaaaggctcaaacagcctctccgggatgcagcggcggtgaacacggtccgatgggtgatcgttgagcggttgaagagactcggtttgccgttggagctgggatcgggcggtcagacgaagcgcaaccgttcgagccgaggttatccgaagaaacactggatcgacgcggcttgtgctggggaatcaggggagtgtgtgcggcttgacccggacatgcgaattttgcggatcgaggcaaaggggcatggaacgcggcgccggtgcgggacggacaagtacgggtttcccatacggcacgcgcctgctgcgaagtcgtacatggggtttcgaacgggggaccttgtgcgggctcatatcccgcgagggaagtatgcgggcacgcacgttggacgcattgctatccggcaccggccgagtttcaggctcaacgggttcgacgtgcatccgaaacacttgaaacttttgcagcgaggtgacgggtatgcgtacaacatgggataa

SEQ ID NO: 1987 - DNA, 287 bp, Unknown
  Ga0207870_100010 JGI
gtcaaccaccccatggctaaagccaggggcttgtgaagaacaagcccggggttgaccagccgaagtccggaggcccattgccttgcggggctacgttattccggtcatgacaccttggggtgcgcgagccagctccaagccctgtcgcgggcggttaaacaggcatacggggtcgaagccggtgccgttcgcatgacaagccgggataacatcggcgaggctcacttgaccgtccaggggcgtaagcccgggacgagggaggaggcgtaagtcccatgcagcagaga

SEQ ID NO: 1988 - DNA, 1299 bp, Unknown
  Ga0224415_10011456 JGI
atgccgacctttaatttcaggaaagtgcgcaggctccttaagagcgggcgggcggatatcttctgccatgagccctttacgatccggcttctgtacgccgaaaagcttgacacacagccagtagaactgtgcattgacgccggggacaggcacatcggcatatccgtaaagagcgaaaagcacgagttcgtccacgcccagtacgatcctctaagggatgagaaggaaaagcatgatgacaggcgcatgtaccgaaggacgagacgaagccgcagacggcacagaaagtcccgcttcgacaacaggaagaagccggaagggtggctcgctccgacggtggagcacaagaaggacctgcacatcagcattacgcagatgtacatcagggtctgccccgtaaccagcatcacggtagaaacggcatcctttgacacacaggccctggaagccatagaaagaggactgccgctgccgaagggaaaggactaccaaaagggtcctcggtacaggatgaacaccctgcgggacgccgtgttttaccgtgacggccacagatgccgcttgtgcgggaataatggcgtgctcagggtacatcacatcggctactggaagggcgaccgttccaaccgcatggggaaccttgctgcggtctgcacgggatgcaatacgcccgcaaaccacaggaagggcggaaggctctacggctgggagccggagatcaaaccccttaaaggcgcggcctttataaacgcggtgagaaagaggctggcggaagaactgagagaaagaacttctcttcccgtgacagagacaaacggcagcgccacaaagacggccagaaagcgcttctgcatagacaagacccacgcgaacgacgcttttgtcatgggaaaatttcacccgaggcacaggcggcaggagcaggtctggcagaagcgcaggagaaataaccggatcctgtcaaagttctatgacgccaggtatgtggacatccgcgacggaaaggtaaagtccggacaggagctgtcctacgggaggctgaaaaggagcgaatccagaaattctgaaaagaacatgcgtccgttccgaggccgcaaggtgaggaaaggccgtgtcagtacaaggaggcggcgctatgccataaggcccgggaccatagtcgtatacgatggacagaaacagtccgtcaagggcatccactgtggcggaacaagggcggttttagaaaacggaaagagcgtatccgtcaaaaaaatcaggggactgaggttccccggcgcatggatgcgcatatcgtaa

SEQ ID NO: 1989 - DNA, 503 bp, Unknown
  Ga0224415_10011456 JGI
gtcaactacccaccgcttaggttctgatgagccttgaagcgggggcttgtagaaagagggaattgtttcttttctattgcaagcccggttgattagccgtgcggatgcaggtccaaaaagggaaaccgcatccgctgcgcggggaaacccgcacaagtgaccccggcatatgccgggagggaactacgttccgggagaaggtatgtaagtgaggcagtctctgccatcaccgcatacgcaggcaccatgggatactccacacgtcccatgcagctgcgccgcagcgttaaacatccctgagggtaaggggaagtgcgctgcgggttgaaaacctcccatgaacatcggcgaagtggatcacccactaaaaaggagaatccgcaggcgacaaactgtaccacgtacagtaaaaggctgcggaaggcgtaagccataacaagaaacattaacactatcgcctgcgggcatggccggaagcacgaatacggctatgggccgcagag

SEQ ID NO: 1990 - DNA, 1545 bp, Nocardiopsis sp. JB363
atggctacgttccgcacagggcagaagacccaccaggccgtgcttcctcagcggcctgctctggaatcggagtcggtagacacgccccggatcgggcacgaaacgggacttcggcaccaccccagggtggtatccggtgcggaccatgtgcgaggggagaccaccctcatctcacctgatgtcggtggcgtcaccacccggcctttggctggggagaggccgcgtgagcggcacccatccgtcttcgtcctggacaagaaccagattccgctccagccctgtcacccggccagggcccgcaaactgttgaacaagggtcgggccgtggtggcccggcacacccctttcaccatccggctcaaggaccgcaccatcgccgagtccgaggtggacggtgtccaggtcgggatcgacccgggcagcaaacacaccggtatcgcggtgttcacccagcatgccggggaacgacgcggccggtacgcgatccagctcgaccaccgtggtgcgcgaatccgaaagaaaatcggccaacgctccgcctataggcggggtcgtcgcttccggaacctgcgccaccgcgcaccccggttcgccaaccgcacccgcccccaagggtggctcgcgccgtccctgcgacaccgggtggagaacaccaccggttgggtggaccggctcacccgatgggcaccggtcaaagcggtgcacgtggaacgggtcgccttcgacacccacgccctgtccgccggcaagcccctagagggcgtggagtatcaacggggcaccctgcacggctatgaggtacgcgagtacctgctggccaagttcgaccgtgcctgtgtgtactgcggggccacgaacacaccactcaacctggaccacgtccacccccgctcccgaggcgggtccgatcgggtgtccaacctggtgttggcgtgcgtgacctgcaaccaggccaagaacaaccggcccgtcgaagagttcatcaccaacaagcaggtcttggctcggattctggctcgggccaaggcacccttgcgagacgcggcggcggtgcagtccacccgatgggcgctctggcgcgctctgaacgaacggttgcctactcatgtcggttcgggtggtcggaccaagtggaaccggacccgcaaccacctaccgaaaacccacactctggacgccctatctgtgggcaagatcgacaccatcacccagaccaccaaccgggtcctggtcgccggatgtgcgggccggggctcctacgcccgcacccgccccgacaagcacggattcccgaggctgcgcctgccccgaaccaaggagttcttcgggttctccaccggcgatctggtccgggccgtggtcccccagggaaagaagaccggcacctataccggccgggtcgcggtacgcgcctcgggcagcttcaacatcaccaccacccaaggcaccgtccaaagcatccgttacaagcacatgcgtctactccaacgagcggacggctatggctacacctggaagggagagggcgtttcctcccggtcctga

SEQ ID NO: 1991 - DNA, 300 bp, Nocardiopsis sp. JB363
gtaaagggatctcggtcctgaaggaccgggcttttcagccccttgtggctgagagccgtctttaccagcaccagccatcgcctacggggaggtgacctcgatggctacgttccgcacagggcagaagacccaccaggccgtgcttcctcagcggcctgctctggaatcggagtcggtagacacgccccggatcgggcacgaaacgggacttcggcaccaccccagggtggtatccggtgcggaccatgtgcgaggggagaccaccctcatctcacctgatgtcggtggcgtcaccacccg

SEQ ID NO: 1992 - DNA, 1356 bp, Unknown
  Ga0118657_10064171 JGI
gtggcaatctttattttagattgcacagaaaaggagttaaatgtgaaagtatttgtgcgaaacaggcagggacaaccgttgatgcccactacaccccgcaaggcgcgtttgttgctgaaggcgggcaaggccgagattgtcgggcgggaacccttcaccatccggttgctgtacggctcaagcggatacaggcaggacgtaacgctgggcattgatgccgggtacaagatgataggctatagcgccgtcaccggccagcgggagttgatcggcggtgaggtggtgatgctgaaggggatgtccgagcggctcaaggaacgggcgatgtaccgccggggcagacggaaccggaagcggtatcgccagccacgatttgacaaccgcaagcggcctgccgggtggcttgcgccgtccattcagcacaaactggatacgcaccggcggttgatagcgcgcattgagtctgttttgccggtgacaagaacgatcatcgaggtggcgaactttgacattcaggccatcagggaccccagtattgagggcaaggcgtatcagcaaggggaacaggcgggcttctggaacttgagggagtacattctgcatcgggacaagcaccaatgccaaaatccggcttgcggaaacaaggccaaggataaggtgctggaagtgcatcacatcgggtactggaagaaagaccggtcggacaggccgggcaacctgagcacgctttgtacgaagtgccacaccccgaggaaccatcaacccggcggtttcctgtacggctggcaacctgcactcaaatcgttcagaccggaaacgtttatgagtaccgtccggtggcggctggttgagggcgagggaacaagccatacctacggctatcgcaccaagtcggggcgcattgcgctggggcttgagaagtcacaccacaacgacgcctttgtgattgcgggcgggcgagagcaggaacgaactgaagcaattgactttgaacagatcaggcgaaatgaccgcagcttgcagaagttctatgacgccaaatacatcgacattcgcacggggcgggaagtgaaaggggctgaactctcatcaggccgaaggacgcgcaaccgcaacctgaacagcgagaacctacggcgataccgaggtccgaagaaacctggccgtctgcaaatcagacgcaggcggtatccctatcagtcgaatgacctgattatggtaggaggcgagaagtaccacagcaagggtacgaaagactacgggcgatacatcgttgttgacgggttgcagaaggcggtcagggctgcgctggtgaccccggttcggtggcgaaaagggctttgcacggcaatctga

SEQ ID NO: 1993 - DNA, 286 bp, Unknown
  Ga0118657_10064171 JGI
gtcaactacccatgctttgaaagtgtgggcttgcggtagcgcaagcccggttgattagcctcagccaccacccgcaagggtgacggggctacgttaaggatgaaaacataggtacttcgggatactctacacgtcccgaacactacgggtcaggtctaaacatcgctgagggtaggcgaagtggcttgactgtatacaaccatctttaacattggcgatgtagaccacaccggaaacggtggcaatctttattttagattgcacagaaaaggagttaaatgtgaaa

SEQ ID NO: 1994 - DNA, 750 bp, Unknown
  Ga0120401_1023611 JGI
atgagagttccagtagtatctaaagatgataagccacttatgccaactaagccagctaaggcacgtaaaatgatagaaggtagagtggctaagaagtgttggtcgaagactggcgtattctacatacaaatgttaatacctgtgggcaaaaaagttcaggatatgttcgcttcgctcaccgacgacttcgtcttacgggcactggcaatagaccctggcagtaaatacgatggatatgccgtgtctggtgagaaagatgtggcactcaaaacgatggcaataatgccacagaaggtacaaaagaaagtaactgagcggcgtcaattaagacgcagtagacgttatcgtaatacgagacgcaggaaggcacggtttgacaacaggaaacgcaaagctgggtggatagcgccgtcacaattggctaaagtgcagttccgcattaaggtagtacaagatttagccaagatgttccccctcaactatatcgctgttgaggatgttaggttcaaccattacaagaagcgatggggtaagcatttctctacagtggagataggaaaggcgatgttgtacgaggaattggaacgacatggcaaagtgataaagtacgctggttggcaaacggcagaagcacggaagtattggggcattaagaaatcaagcgctaaagatgctctgataccttcttcccatgccaatgatgctcttgcgatgctcaatgaagtattcggggataatgtggataattca

SEQ ID NO: 1995 - DNA, 268 bp, Unknown
  Ga0120401_1023611 JGI
tcagtcaatgacccctcctgaatcatagattcagaagggcttggagatgcaggactctaagggtaactcttgactagagggcttaggtaatcctaagcaggcgcactgcgatggtacatacgtcagagtatttcgcaagctctgacctctataagctgcctcttgcgggtagcggggaaggacccgacatctttcgcagttgcaatctcgatgcgacctttactttatgtcccgaatatcgggactccgaaaggagacagcaatgaga

SEQ ID NO: 1996 - DNA, 1284 bp, Unknown
  human gut metagenome genome assembly, contig: NODE_564_length_37814_cov_32.665907, whole genome shotgun sequence WGS
atgagagtatttgtattcaatatgcgtggcagaccattaatgccatgctcacaaagaaaagccagattactcctaagggaaaataaggctatgatttataaatatcatccatttacgattcagctgacttatacaactggagaaacaaagcaggactgtcatataggtatagacacaggttctaaatatataggagctgctgtcagatcagaggataaggttttttggaaaggcgaaatcgagcttcgacaggatatcaggtcaaatcttgatacgaaacgtatttatcgcagaagcagacgaaatcgtaaaacaagataccgaaaaccaaggtttttaaatcgtaagagaagagatgaatggcttccacctagcttgcaaagcaggataaatcatacgtttcattggattgacacattgagtagtttggttccaaaccccattcttcacatagaagtcggtaagtttgatgtagcaaagatgataaatcctgaaatccatggagttgactatcaacatggtcagacatatggtttcttcgatgaaaggtattttgtttttgcaagagataactacacttgtcagtgctgtggaaagtcaaaaaataagattttgaacacacatcatatcatctaccgcagtaatggcggaacaaacagagttgataatcttattacagtttgcacagattgtcatacatcgcagaatcacaggaaaggtggaatattctatcaatggcaggagcagcataaaaaggtaaaacaatacaaagaaccgccgttcatgaataccttacgtaagaggatatttgtagcgtatccagatgctgagatcacatatggatctgaaacaacaccaaaacgtaaggcgatgaaattggataagacgcactataatgatgcgattgtcattagtggtatcaatgaaatcaatgaaatcaaagaaaatcctgaagaatggttactgataaaacaattccgcaaaaagaaacgctctttacacgaggctaccgcccgtaagggaagaaaaaagccaaacagaaatcagacgcgtaacagtaagaatacgccttattataaaggattttatcttaacgataaggtttcagtttttggaaagagtggatatattacaggatttacgagcaatgcggcatatataaaagatgagaacaatgactatattactctgccaaacaaaacctataaacaggtcagcatcaataaaatgaagttggaatgtcataacaacaattggcagtacataataaaaaatgctgtgtaa

SEQ ID NO: 1997 - DNA, 286 bp, Unknown
  human gut metagenome genome assembly, contig: NODE_564_length_37814_cov_32.665907, whole genome shotgun sequence WGS
gtcaataaccccgacctacagtaataactgttgaggtcggagattgtaaaagctcatattgactagcctaagttcttcgagaactacgttgtttatgttatcacacctgcgaatgataccatagtttgcagccttgtgtaggctctgtaaaagttctgtgaggtaggaacggtcaacctagtatgttcgatcacgacaagcatttacaacattggcgaagggtaacaaactttcaaaagaaagggacagcacttgagagtagctgtcaaaggtaaaaactatgaga

SEQ ID NO: 1998 - DNA, 714 bp, Unknown
  Ga0392328_0075420 JGI
atgagtgtatctgtctatgtgttgaacatgagggggaaacctctcatgcccacaacaccaccaaaagcaagaaaattaattaaaaatgaaaaagtaaaagtaaagcaaagattaccatttattatccagttaaaatatgttactggagaaacaaaagaaccaattaccttaggaatagactctggttatcaatttgttggcttttcagctaatacagagaagaaagaattaatatcaggagaactagaacttagaaaagatatttcaaagaatcttactcaaaaaagacaatatcgaggaaccagaagaaatagattatggtaccgtaaaccacgctttaataatcggggttctaagaaaaaaagctggtttgcaccaagtattaagcacaagttaacctctcacaagaaactgattgaaaaacttgagcaaatacttccaataaccagaataattattgaagttgctacttttgatgcccataagatgaagaagccggaggtaacgggtgttgaatatcaacagggtgatcttcaaggttatgagatcagagaatatttgcttgaaaaatggaagagaaaatgtgcttattgtgacaagaaaaacgtgaaattggagatcgagcatattattcctaagtcaagaggaggaagtaatagagtagataacctaactatttcatgcagaaaatgcaatcttaaaaaaaggaaataa

SEQ ID NO: 1999 - DNA, 289 bp, Unknown
  Ga0392328_0075420 JGI
gtcaatcacccactatcacccttcggggtgagacggggcttgtggagtgatctacaagagtaattggttgattagcctaagaggagtatgaaaatatgaaatctaagttatcagtaaagttaaagaacacaccaaaggatgcttctcaagtcctttgctctgtaagcggtggattaaacagagaggaaactctcagtgttcaccgcaaagtactggctgataaccttggcgaagagaacctacttcttaaatttttaaagtttaaggaggacagaacatgagtgtatct

SEQ ID NO: 2000 - DNA, 1290 bp, Unknown
  Ga0207193_1000100 JGI
atggtatatgtattaaataaagatgggaaaccactcatgcctagcattagacatggtaaaatcagaagaatgttgaaagagaagaaagctgtagtagttaaaactactcctttcacagttaaactcttatacactcctaagacaaatgtaatacagaatctagttctaggaatagaccctggaagtagaactctgtcaactgtagttagagttgagaaaactcctaaactagtctatgtttctgaagttaaagttagaactgatattactagtaagttgaaaaagagaagttcctacagaaaaactaggagaaatcgtaaaactagatacagagaatcacgtttcttaaacaggaaaaggaaagagaaatggctaccacctagtgttgtttctaaacttaattctcacaagaaagagataaagtttatctttaacatcttacctgtctctagagtaatcctagagagaaatacttttgatactcataagttaaagaatcctagtatcagtggtaaaggatacaaacatggtacactctactcttatgagaatcacagacagtacgttttaactagagataagtactgctgtagaagttgtaaaaagaagaatgtagttctcaacactcatcacattacgtttaaaagtaaaggaggaaaagatcactactctaacctagttaccctttgtgaaacatgccacaagaaagttcacagtggaaagttaaaactacataagaaacttctagctagtctaggaacaagtgtaaacacattagatgctactcacgctacaatcatttctaagagactagaagaatttctcttaaaacacaaagacagaagaaattataaatttttaactacttttgggtatgagacagtagtaaaaagaagaattctaaagttaaagaaaactcactacaatgatgcaatttctatatcctatcctattaaaacctcttactctaagactagagcagaatttatgtttagaaagatatcggtgagtaaaggagactaccagcagactaaaggtgtaagaagtcaggtaaagatacctacttgcaagattcatgggtttaggaagtttgacattgtacagtatcttggaaagtattacattattaaaggtagaatgagttctggttacgcaattcttatgaattctaagttaaaaccagtaaattttggaactaatggtaagagtaaacctactgtgaactttaaacttttgaaaagaattagttctagaagaagtactcttataatagaagttagaaaacactag

SEQ ID NO: 2001 - DNA, 308 bp, Unknown
  Ga0207193_1000100 JGI
gtgagctacgtcgggctaaagcactggcgcttctctaaggagatgcagtagttcaccagactcaggttagagaaatctaaactacgttgaagaagttaccacacctaagaatgccgcctcagttcctagctctgtgtaggctctgtaagaagggatgcaaaacccggtcaacctaagttcgatgtcccaaggacacaagctttttcaacattgtcgagaggaagttggaagatttcaatggttatagctgaaattagtacacgttacatcgaaagatggcttatagcaaactttaaaggtaatttatg

SEQ ID NO: 2002 - protein, 7 aa, Simian virus 40
PKKKRKV

SEQ ID NO: 2003 - protein, 16 aa, Artificial Sequence
  Synthetic nucleoplasmin bipartite NLS
KRPAATKKAGQAKKKK

SEQ ID NO: 2004 - protein, 9 aa, Homo sapiens
PAAKRVKLD

SEQ ID NO: 2005 - protein, 11 aa, Homo sapiens
RQRRNELKRSP

SEQ ID NO: 2006 - protein, 38 aa, Homo sapiens
NQSSNFGPMKGGNFGGRSSGPYGGGGQYFAKPRNQGGY

SEQ ID NO: 2007 - protein, 42 aa, Homo sapiens
RMRIZFKNKGKDTAELRRRRVEVSVELRKAKKDEQILKRRNV

SEQ ID NO: 2008 - protein, 8 aa, Homo sapiens
VSRKRPRP

SEQ ID NO: 2009 - protein, 8 aa, Homo sapiens
PPKKARED

SEQ ID NO: 2010 - protein, 8 aa, Homo sapiens
PQPKKKPL

SEQ ID NO: 2011 - protein, 12 aa, Mus sp.
SALIKKKKKMAP

SEQ ID NO: 2012 - protein, 5 aa, Influenza virus
DRLRR

SEQ ID NO: 2013 - protein, 7 aa, Influenza virus
PKQKKRK

SEQ ID NO: 2014 - protein, 10 aa, Hepatitis D virus
RKLKKKIKKL

SEQ ID NO: 2015 - protein, 10 aa, Mus sp.
REKKKFLKRR

SEQ ID NO: 2016 - protein, 20 aa, Homo sapiens
KRKGDEVDGVDEVAKKKSKK

SEQ ID NO: 2017 - protein, 17 aa, Homo sapiens
RKCLQAGMNLEARKTKK

SEQ ID NO: 2018 - protein, 4 aa, Artificial Sequence
  Synthetic
GGGS

SEQ ID NO: 2019 - protein, 5 aa, Artificial Sequence
  Synthetic
GGGGS

SEQ ID NO: 2020 - protein, 9 aa, Artificial Sequence
  Synthetic
GGSGGSGGS

SEQ ID NO: 2021 - protein, 15 aa, Artificial Seqence
  Synthetic
GGGGSGGGGSGGGGS

SEQ ID NO: 2022 - protein, 5 aa, Artificial Sequence
  Synthetic
GGGGS

SEQ ID NO: 2023 - protein, 10 aa, Artificial Sequence
  Synthetic
GGGGSGGGGS

SEQ ID NO: 2024 - protein, 20 aa, Artificial Sequence
  Synthetic
GGGGSGGGGSGGGGSGGGGS

SEQ ID NO: 2025 - protein, 25 aa, Artificial Sequence
  Synthetic
GGGGSGGGGSGGGGSGGGGSGGGGS

SEQ ID NO: 2026 - protein, 30 aa, Artificial Sequence
  Synthetic
GGGGSGGGGSGGGGSGGGGSGGGGSGGGGS

SEQ ID NO: 2027 - protein, 35 aa, Artificial Sequence
  Synthetic
GGGGSGGGGSGGGGSGGGGSGGGGSGGGGSGGGGS

SEQ ID NO: 2028 - protein, 40 aa, Artificial Sequence
  Synthetic
GGGGSGGGGSGGGGSGGGGSGGGGSGGGGSGGGGSGGGGS

SEQ ID NO: 2029 - protein, 45 aa, Artificial Sequence
  Synsthetic
GGGGSGGGGSGGGGSGGGGSGGGGSGGGGSGGGGSGGGGSGGGGS

SEQ ID NO: 2030 - protein, 50 aa, Artificial Sequence
  Synthetic
GGGGSGGGGSGGGGSGGGGSGGGGSGGGGSGGGGSGGGGSGGGGSGGGGS

SEQ ID NO: 2031 - protein, 55 aa, Artificial Sequence
  Synthetic
GGGGSGGGGSGGGGSGGGGSGGGGSGGGGSGGGGSGGGGSGGGGSGGGGSGGGGS

SEQ ID NO: 2032 - protein, 60 aa, Artificial Sequence
  Synthetic
GGGGSGGGGSGGGGSGGGGSGGGGSGGGGSGGGGSGGGGSGGGGSGGGGSGGGGSGGGGS

SEQ ID NO: 2033 - protein, 32 aa, Artificial Sequence
  Synthetic
LEPGEKPYKCPECGKSFSQSGALTRHQRTHTR

SEQ ID NO: 2034 - protein, 20 aa, Artificial Sequence
  Synthetic
PKKKRKVEASSPKKRKVEAS

SEQ ID NO: 2035 - protein, 21 aa, Artificial Sequence
  Synthetic
GGSGGSGGSGGSGGSGGSGGS

SEQ ID NO: 2036 - DNA, 27 bp, Artificial Sequence
  Synthetic
ggtggtagtggagggagcggcggttca

SEQ ID NO: 2037 - DNA, 72 bp, Artificial Sequence
  Synthetic
ggtggaggaggctctggtggaggcggtagcggaggcggagggtcgggtggtagtggagggagcggcggttca

SEQ ID NO: 2038 - DNA, 48 bp, Artificial Sequence
  Synthetic
tcgggatctgagacgcctgggacctcggaatcggctacgcccgaaagt

SEQ ID NO: 2039 - DNA, 192 bp, Artificial Sequence
  Synthetic
gtggataacaaatttaacaaagaaatgtgggcggcgtgggaagaaattcgtaacctgccgaacctgaacggctggcagatgaccgcgtttattgcgagcctggtggatgatccgagccagagcgcgaacctgctggcggaagcgaaaaaactgaacgatgcgcaggcgccgaaaaccggcggtggttctggt

SEQ ID NO: 2040 - DNA, 108 bp, Artificial Sequence
  Synthetic
ggtggttctgccggtggctccggttctggctccagcggtggcagctctggtgcgtccggcacgggtactgcgggtggcactggcagcggttccggtactggctctggc

SEQ ID NO: 2041 - protein, 400 aa, Artificial Sequence
  Synthetic
MSTDATLIRTTPSHAEADATDTLVATPLMPPRRVISPWPGPGEGQSLMRIPVVDIRGMALMPCTPAKARHLLKSGNARPKRNKLGLFYVQLSYEQEPDNQSLVAGVDPGSKFEGLSVVGTKDTVLNLMVEAPDHVKGAVQTRRTMRRARRQRKWRRPKRFHNRLNRMQRIPPSTRSRWEAKARIVAHLRTILPFTDVVVEDVQAVTRKGKGGTWNGSFSPVQVGKEHLYRLLRAMGLTLHLREGWQTKELREQHGLKKTKSKSKQSFESHAVDSWVLAASISGAEHPTCTRLWYMVPAILHRRQLHRLQASKGGVRKPYGGTRSLGVKRGTLVEHKKYGRCTVGGVDRKRNTISLHEYRTNTRLTQAAKVETCRVLTWLSWRSWLLRGKRTSSKGKGSHS

SEQ ID NO: 2042 - protein, 432 aa, Artificial Sequence
  Synthetic
MQPAKQQNWVFQINGDKQPLDMINPGRCRELQNRGKLASFRRFPYVVIQQQTIENPQTKEYILKIDPGSQWTGFAIQCGNDILFRAELNHRGEAIKFDLVKRAWFRRGRRSRNLRYRKKRLNRAKPEGWLAPSIRHRVLTVETWIKRFMRYCPIAWIEIEQVRFDTQKLANPEIDGVEYQQGELQGYEVREYLLQKWGRKCAYCGTENVPLEVEHIQSKSKGGSSRIGNLTLACHVCNVKKGNLDVRDFLAKSPDILNQVLENSTKPLKDAAAVNSTRYAIVKMAKSICENVKCSSGARTKMNRVRQGLEKTHSLDAACVGESGASIRVLTDRPLLITCKGHGSRQSIRVNASGFPAVKNAKTVFTHIAAGDVVRFTIGKDRKKAQAGTYTARVKTPTPKGFEVLIDGARISLSTMSNVVFVHRSDGYGYEL

SEQ ID NO: 2043 - protein, 461 aa, Artificial Sequence
  Synthetic
MAVFVIDKHKRPLMPCSEKRARLLLERGRAVVHRQVPFVIRLKDRTVQHSAVQPLRVALDPGSRATGMALVREKNTVDTGTGEVYRERIALNLFELVHRGHRIREQLDQRRNFRRRRRGANLRYRAPRFDNRRRPPGWLAPSLQHRVDTTMAWVRRLCRWAPASAIGIETVRFDTQRLQNPEISGVEYQQGALAGCEVREYLLEKWGRKCAYCGAENVPLEIEHIVPKSRGGSDRVSNLALACRACNQAKGNRDVRAFLADQPERLARILAQAKAPLKDAAAVNATRWALYRALVDTGLPVEAGTGGRTKWNRTRLGLPKTHALDALCVGQVDQVRHWRVPVLGIRCAGRGSYRRTRLTRHGFPRGYLTRNKSAFGFQTGDLIRAVVTKGKKAGTYLGRIAIRASGSFNIQTPMGVVQGIHHRFCTLLQRADGYGYFVQPKPTEAALSSPRLKAGVSSAGN

SEQ ID NO: 2044 - protein, 439 aa, Artificial Sequence
  Synthetic
MTTNVVFVIDTNQKPLQPCSAAVARKLLLRGKAAMFRRYPAVIILKKEVDSVGKPKIELRIDPGSKYTGFALVDSKDNADFIIWGTELEHRGAAICKELTKRSAIRRSRRNRKTRYRKKRFERRKPEGWLAPSLQHRVDTTLTWVKRICKFVPIMSISVEQVKFDLQKLENSDIQGIEYQQGTLAGYTLREALLEHWGRKCAYCDVENVFLEIEHIYPKSKGGSDKFSNLTLACHKCNINKGNKSIDEFLLSDHKRLEQIKLHQKKTLKDAAAVNATRKKLVTTLQEKTFLNVLVSDGASTKMTRLSSSLAKRHWIDAGCVNTTLIVILKTLQPLQVKCNGHGNKQFVTMDAYGFPRKSYEPKKVRKDWKAGDIIRVTKKDGTMLMGRVKKAAKKLVYIPFGGKEASFSSENAKAIHRSDGYRYSFAAIDSELLQKMAT

SEQ ID NO: 2045 - protein, 419 aa, Artificial Sequence
  Synthetic
MPNKYAFVLDSKGKLLDPTKSKKAWYLIRKGKASLVEEYPLIIKLKREVPKDQVNSDKLILGIDDGTKKVGFALVQKCQTKNKVLFKAVMEQRQDVSKKMEERRGYRRYRRSHKRYRPARFDNRSSSKRKGRIPPSILQKKQAILRVVNKLKKYIRIDKIVLEDVSIDIRKLTEGRELYNWEYQESNRLDENLRKATLYRDDCTCQLCGTTETMLHAHHIMPRRDGGADSIYNLITLCKACHKDKVDNNEYQYKDQFLAIIDSKELSDLKSASHVMQGKTWLRDKLSKIAQLEITSGGNTANKRIDYEIEKSHSNDAICTTGLLPVDNIDDIKEYYIKPLRKKSKAKIKELKCFRQRDLVKYTKRNGETYTGYITSLRIKNNKYNSKVCNFSTLKGKIFRGYGFRNLTLLNRPKGLMIV

SEQ ID NO: 2046 - protein, 1409 aa, Artificial Sequence
  Synthetic
MLFNKCIIISINLDFSNKEKCMTKPYSIGLDIGTNSVGWAVITDNYKVPSKKMKVLGNTSKKYIKKNLLGVLLFDSGITAEGRRLKRTARRRYTRRRNRILYLQEIFSTEMATLDDAFFQRLDDSFLVPDDKRDSKYPIFGNLVEEKVYHDEFPTIYHLRKYLADSTKKADLRLVYLALAHMIKYRGHFLIEGEFNSKNNDIQKNFQDFLDTYNAIFESDLSLENSKQLEEIVKDKISKLEKKDRILKLFPGEKNSGIFSEFLKLIVGNQADFRKCFNLDEKASLHFSKESYDEDLETLLGYIGDDYSDVFLKAKKLYDAILLSGFLTVTDNETEAPLSSAMIKRYNEHKEDLALLKEYIRNISLKTYNEVFKDDTKNGYAGYIDGKTNQEDFYVYLKNLLAEFEGADYFLEKIDREDFLRKQRTFDNGSIPYQIHLQEMRAILDKQAKFYPFLAKNKERIEKILTFRIPYYVGPLARGNSDFAWSIRKRNEKITPWNFEDVIDKESSAEAFINRMTSFDLYLPEEKVLPKHSLLYETFNVYNELTKVRFIAESMRDYQFLDSKQKKDIVRLYFKDKRKVTDKDIIEYLHAIYGYDGIELKGIEKQFNSSLSTYHDLLNIINDKEFLDDSSNEAIIEEIIHTLTIFEDREMIKQRLSKFENIFDKSVLKKLSRRHYTGWGKLSAKLINGIRDEKSGNTILDYLIDDGISNRNFMQLIHDDALSFKKKIQKAQIIGDEDKGNIKEVVKSLPGSPAIKKGILQSIKIVDELVKVMGGRKPESIVVEMARENQYTNQGKSNSQQRLKRLEKSLKELGSKILKENIPAKLSKIDNNALQNDRLYLYYLQNGKDMYTGDDLDIDRLSNYDIDHIIPQAFLKDNSIDNKVLVSSASNRGKSDDFPSLEVVKKRKTFWYQLLKSKLISQRKFDNLTKAERGGLLPEDKAGFIQRQLVETRQITKHVARLLDEKFNNKKDENNRAVRTVKIITLKSTLVSQFRKDFELYKVREINDFHHAHDAYLNAVIASALLKKYPKLEPEFVYGDYPKYNSFRERKSATEKVYFYSNIMNIFKKSISLADGRVIERPLIEVNEETGESVWNKESDLATVRRVLSYPQVNVVKKVEEQNHGLDRGKPKGLFNANLSSKPKPNSNENLVGAKEYLDPKKYGGYAGISNSFAVLVKGTIEKGAKKKITNVLEFQGISILDRINYRKDKLNFLLEKGYKDIELIIELPKYSLFELSDGSRRMLASILSTNNKRGEIHKGNQIFLSQKFVKLLYHAKRISNTINENHRKYVENHKKEFEELFYYILEFNENYVGAKKNGKLLNSAFQSWQNHSIDELCSSFIGPTGSERKGLFELTSRGSAADFEFLGVKIPRYRDYTPSSLLKDATLIHQSVTGLYETRIDLAKLGEG

SEQ ID NO: 2047 - protein, 1053 aa, Artificial Sequence
  Synthetic
MKRNYILGLDIGITSVGYGIIDYETRDVIDAGVRLFKEANVENNEGRRSKRGARRLKRRRRHRIQRVKKLLFDYNLLTDHSELSGINPYEARVKGLSQKLSEEEFSAALLHLAKRRGVHNVNEVEEDTGNELSTKEQISRNSKALEEKYVAELQLERLKKDGEVRGSINRFKTSDYVKEAKQLLKVQKAYHQLDQSFIDTYIDLLETRRTYYEGPGEGSPFGWKDIKEWYEMLMGHCTYFPEELRSVKYAYNADLYNALNDLNNLVITRDENEKLEYYEKFQIIENVFKQKKKPTLKQIAKEILVNEEDIKGYRVTSTGKPEFTNLKVYHDIKDITARKEIIENAELLDQIAKILTIYQSSEDIQEELTNLNSELTQEEIEQISNLKGYTGTHNLSLKAINLILDELWHTNDNQIAIFNRLKLVPKKVDLSQQKEIPTTLVDDFILSPVVKRSFIQSIKVINAIIKKYGLPNDIIIELAREKNSKDAQKMINEMQKRNRQTNERIEEIIRTTGKENAKYLIEKIKLHDMQEGKCLYSLEAIPLEDLLNNPFNYEVDHIIPRSVSFDNSFNNKVLVKQEENSKKGNRTPFQYLSSSDSKISYETFKKHILNLAKGKGRISKTKKEYLLEERDINRFSVQKDFINRNLVDTRYATRGLMNLLRSYFRVNNLDVKVKSINGGFTSFLRRKWKFKKERNKGYKHHAEDALIIANADFIFKEWKKLDKAKKVMENQMFEEKQAESMPEIETEQEYKEIFITPHQIKHIKDFKDYKYSHRVDKKPNRELINDTLYSTRKDDKGNTLIVNNLNGLYDKDNDKLKKLINKSPEKLLMYHHDPQTYQKLKLIMEQYGDEKNPLYKYYEETGNYLTKYSKKDNGPVIKKIKYYGNKLNAHLDITDDYPNSRNKVVKLSLKPYRFDVYLDNGVYKFVTVKNLDVIKKENYYEVNSKCYEEAKKLKKISNQAEFIASFYNNDLIKINGELYRVIGVNNDLLNRIEVNMIDITYREYLENMNDKRPPRIIKTIASKTQSIKKYSTDILGNLYEVKSKKHPQIIKKG

SEQ ID NO: 2048 - protein, 1365 aa, Streptococcus pyogenes
KYSIGLDIGTNSVGWAVITDEYKVPSKKFKVLGNTDRHSIKKNLIGALLFDSGETAEATRLKRTARRRYTRRKNRICYLQEIFSNEMAKVDDSFFHRLEESFLVEEDKKHERHPIFGNIVDEVAYHEKYPTIYHLRKKLVDSTDKADLRLIYLALAHMIKFRGHFLIEGDLNPDNSDVDKLFIQLVQTYNQLFEENPINASGVDAKAILSARLSKSRRLENLIAQLPGEKKNGLFGNLIALSLGLTPNFKSNFDLAEDAKLQLSKDTYDDDLDNLLAQIGDQYADLFLAAKNLSDAILLSDILRVNTEITKAPLSASMIKRYDEHHQDLTLLKALVRQQLPEKYKEIFFDQSKNGYAGYIDGGASQEEFYKFIKPILEKMDGTEELLVKLNREDLLRKQRTFDNGSIPHQIHLGELHAILRRQEDFYPFLKDNREKIEKILTFRIPYYVGPLARGNSRFAWMTRKSEETITPWNFEEVVDKGASAQSFIERMTNFDKNLPNEKVLPKHSLLYEYFTVYNELTKVKYVTEGMRKPAFLSGEQKKAIVDLLFKTNRKVTVKQLKEDYFKKIECFDSVEISGVEDRFNASLGTYHDLLKIIKDKDFLDNEENEDILEDIVLTLTLFEDREMIEERLKTYAHLFDDKVMKQLKRRRYTGWGRLSRKLINGIRDKQSGKTILDFLKSDGFANRNFMQLIHDDSLTFKEDIQKAQVSGQGDSLHEHIANLAGSPAIKKGILQTVKVVDELVKVMGRHKPENIVIEMARENQTTQKGQKNSRERMKRIEEGIKELGSQILKEHPVENTQLQNEKLYLYYLQNGRDMYVDQELDINRLSDYDVDHIVPQSFLKDDSIDNKVLTRSDKNRGKSDNVPSEEVVKKMKNYWRQLLNAKLITQRKFDNLTKAERGGLSELDKAGFIKRQLVETRQITKHVAQILDSRMNTKYDENDKLIREVKVITLKSKLVSDFRKDFQFYKVREINNYHHAHDAYLNAVVGTALIKKYPKLESEFVYGDYKVYDVRKMIAKSEQEIGKATAKYFFYSNIMNFFKTEITLANGEIRKRPLIETNGETGEIVWDKGRDFATVRKVLSMPQVNIVKKTEVQTGGFSKESILPKRNSDKLIARKKDWDPKKYGGFDSPTVAYSVLVVAKVEKGKSKKLKSVKELLGITIMERSSFEKNPIDFLEAKGYKEVKKDLIIKLPKYSLFELENGRKRMLASAGELQKGNELALPSKYVNFLYLASHYEKLKGSPEDNEQKQLFVEQHKHYLDEIIEQISEFSKRVILADANLDKVLSAYNKHRDKPIREQAENIIHLFTLTNLGAPAAFKYFDTTIDRKRYTSTKEVLDATLIHQSITGLYETRIDLSQLGGD

SEQ ID NO: 2049 - protein, 463 aa, Artificial Sequence
  Synthetic
MSRVLVVDADRRVLAPCTARRARLLLSGGKAAVLRRYPFTIILKQSYPTASPRPVRLKLDPGSKTTGIAVVTEATGEVVWAAELQHRGQLIKDALESRRSLRSSRRNRKTRYRPPRWRNRKRTGPPVLSSAGEVNQLGKWLAPSLQHRIEVIMTWVHRLRRYLPITAISQEIVRFDMQKMQNPEISGVEYQQGTLFGFEVREYLLDKWHRRCGYCGAQNTRLEVDHIVPRSHGGSDRVSNLTLSCEPCNKKKSNRPAALFLAKKPEVLQKLQRQAKAPLKDAAAVNSTRYALLERLKATGLPVEIASGGRTKFNRFERQIPKTHWLDAACVGASTPEVLQWEAVRPLAIKAMGHGKRQVTNVDAYGFPKGKPKGIPVHPFRTGDVIRAEVPVGKFAGNYVDRIVAIRTDQTRVSLPLRSQEKGKKKVPFLFQTKYITAKLFSADGYDYGFLQPPEPRTQRTES

SEQ ID NO: 2050 - protein, 463 aa, Artificial Sequence
  Synthetic
MSRVLVVDADRRVLAPCTARRARLLLSGGKAAVLRRYPFTIILKQSYPTASPRPVRLKLDPGSKTTGIAVVTEATGEVVWAAELQHRGQLIKDALESRRSLRSSRRNRKTRYRPPRWRNRKRTGPPVLSSAGEVNQLGKWLAPSLQHRIEVIMTWVHRLRRYLPITAISQEIVRFDMQKMQNPEISGVEYQQGTLFGFEVREYLLDKWHRRCGYCGAQNTRLEVDHIVPRSHGGSDRVSNLTLSCEPCNKKKSNRPAALFLAKKPEVLQKLQRQAKAPLKDAAAVNSTRYALLERLKATGLPVEIASGGRTKFNRFERQIPKTHWLDAACVGASTPEVLQWEAVRPLAIKAMGHGKRQVTNVDAYGFPKGKPKGIPVHPFRTGDVVRAEVPVGKFAGNYVDRIVAIRTDQTRVSLPLRSQEKGKKKVPFLFQTKYITAKLFSADGYDYGFLQPPEPRTQRTES

SEQ ID NO: 2051 - protein, 445 aa, Artificial Sequence
  Synthetic
MSKVFVVDKERRPLAPCTPRRARLLLSECKASVLRQYPFTIILKESHATATPRPLRLKIYPASKTTGLAVINESTAEVVWAAELKHRGHLIKKALESRRSLRRGRRSRKTRYRPARWLNRVRKPPVFTNTEGVVVTGKWLPPSLQHRIEVVMTWVERLQHYLQITAISQEVMRFDTQKLQNPELSGVEYQQGTLHGYEVREYLLEKWSRKCAYCGARDTRLEISHLIARSRGGSDQVSNLTLACKACRDQKGDSNLEKFLATKPKILKKLQSQARVSLKDVAAINSTRLALLERLKATGLPVEVSSGGETKYNRNQQQIPKSHWLDAVCVGASTPENLEWQQVKPLAIKAMGHGKRQMVNVDAFGFPRGKPKGIPVHPFRTGDIVRVTIPKGKYAGEYEERISSIKTSETRVGIPNKKEKGTIYLQTKYITAKIFSSDGYDYDYL

SEQ ID NO: 2052 - protein, 449 aa, Artificial Sequence
  Synthetic
MSQVFVVDKERRPLAPCTPRRARLLLSECKASVFRRYPFTIILKESHATATPRPLRLKIYPASKTTGLAVINESTAEVVWAAELKHRSQLIKKALESRRSLRSGRRSRKTRYRPARWLNRVRNNPVFTNTEGAVITGKWLPPSLQHRVEVVMTWVERLQRYLPITALSQEIMRFDTQKLQNPEISGVEYQQGTLHGYEVREYLLEKWSRKCAYCGARDTRLEINHIVARSRGGSDRVSNLTLACRSCREQRGASNLEEFLATRPALLMKLQSQAQVSLRDVAAINSTRFVLLERLKARGLPVEVSSGGETKFNRNQQQIPRSHWLNAVCIGPNTPENLKWDQVQPLAIKAMGHGKRQMVNVDAFGFPRGKPKGTPVHPFRTGDVVRAAIPKGKYVGEYEERISSIKTSETRVGIPNKKGQGTIYLQTKYITTKIFSSDGFDYEFLTSES

SEQ ID NO: 2053 - protein, 449 aa, Artificial Sequence; identical to SEQ ID NO: 2052
  Synthetic

SEQ ID NO: 2054 - protein, 457 aa, Artificial Sequence
  Synthetic
MSRVLVVDANRCPLAPCTPRRARLLLNSGKAAVLRRYPFTIILKQSYPTANPRPVRLKLDPGSKTTGIAVVTEATGEVVWAAELQHRGQLIKNALESRRSLRRGRRNRKTRYRPARWLNRKRTGPPVLSSADTVSTLGKWLAPSLQHRIEVIMTWVHRLRRYLPITAISQEIVRFDMQKMQNPEISGVEYQQGTLFGYEVREYLLDKWQRQCGYCGAKDKRLEVDHIVPRSHGGSDRVSNLTLSCEPCNKRKNQRPAAVFLAKKPEVLQKLQRQAKAPLKDAAAVNSTRYALLERLKATGLPVEIASGGRTKFNRSERQIPKTHWLDAACVGASTPEVLQWKAVKPLAIKAMGHGKRQVVNVDAYGFPRGKAKGIPVHPFRTGDIVRAEIPKGKYVGTYVSRIAETTTSKPLAGFKSKTGKRIQCHTKHMTKLFNSDGYGYGFLKAPEPRQTVISES

SEQ ID NO: 2055 - protein, 457 aa, Artificial Sequence
  Synthetic
MSRVLVVDADRCPLAPCTPRRARLLLNSGKAAVLRRYPFTIILKQSYPTASPRPVRLKLDPGSKTTGIAVVTEATGEVVWAAELQHRGQLIKNALESRRSLRRGRRNRKTRYRPARWLNRKRTGPPLLSSADTVSTLGKWLAPSLQHRIEVIMTWVHRLRRYLPITAISQEIVRFDMQKMQNPEISGVEYQQGTLFGYEVREYLLDKWRRQCGYCGAKDKRLEVDHIVPRSHGGSDRVSNLTLSCEPCNKRKNQRPAAVFLAKKPEVLQKLQRQAKAPLKDAAAVNSTRYALLERLKATGLPVEVASGGRTKFNRSERQIPKTHWLDAACVGASTPEVLQWEAVRPLAIKAMGHGKRQVVNVDAYGFPRGKAKGIPVHPFRTGDIVRAEIPKGKYVGTYVSRIAETTTSKPLAGFKSKTGKRIQCHTKHMTKLFNSDGYGYGFLKAPEPRQTVISES

SEQ ID NO: 2056 - protein, 448 aa, Artificial Sequence
  Synthetic
MSKVFVVDKERRPLAPCTPRRARLLLSECKASVLRQYPFTIILKESHATATPRPLRLKIYPASKTTGLAVINESTAEVVWAAELKHRGHLIKKALESRRSLRRGRRSRKTRYRPARWLNRVRKPPVLTNTEGVVVTGKWLPPSLQHRIKVVMTWVERLQHYLQITALSQEVMRFDTQKLQNPEISGVWYQQGTLHGYEVREYLLEKWSRKCAYCGARDTRLEISHLIARSRGGSDQVSNLTLACKACRDQKGDSNLEKFLATKPKILKKLQSQARVSLKDVAAINSTRLALLERLKATGLPVEVSSGGETKYNRNQQQIPKSHWLDAVCVGASTPENLEWQQVNPLAIKAMGHGKRQMVNVDAFGFPRGKPKGIPVHPFRTGDIVRVTIPKGKYAGEYEERISSIKTSETRVGIPNKKEKGTIYLQTKYITAKIFSSDGYEYYFYPNK

SEQ ID NO: 2057 - protein, 457 aa, Artificial Sequence; identical to SEQ ID NO: 2055
  Synthetic

SEQ ID NO: 2058 - protein, 9 aa, Artificial Sequence
  Synthetic
IEVMYPPPY

SEQ ID NO: 2059 - protein, 432 aa, Ktedonobacter racemifer
MNVVYVLSPERTPLMPCQPAIARLLLKQGKAKVRHRTPFTIQLLAQPEHVYTQPLTHGVDTGSSIIGSAVANEHGHVVYLSEVEIRNDIANTMKERARARRNRRQRKTRYRPARWLNRKKSIKTGRFSPTMRSKIDTHLREIRFIRSLLPITSTILETGSFDPYALRNPEVLQKKWLYQRGINYGFANTKAYVLTRDGYLCQQCKGKSKDRRLEVHHIIFRSRNGSDEEANLLTLCKTCHDGLHAGTITLKLTGKKKGTLQHATQMNSIRIQLLKRVEAEETWGFVTKEHRLLVGLPKEHIFDAAVIATRGVKPTFYTTSVLSKHCVSDGDYKQTKGKHGQQRVNTGKIMGFRKFDKVYYLGKEYFIKGRMSTGYAILMDIDGNKIEFKPLPKFDKMKRVSARSSWMMKQRTTPNPSFSITSSLSASAGKNV

SEQ ID NO: 2060 - DNA, 322 bp, Artificial Sequence
  Synthetic
gtgaactaccactgagctgaagacgcagtggcttcttcggaagtcactgaagacgcagaccaggagctccttcggaagcttgagttcaccagactcgtttccagaaatgggaacagcgttcgattggtcatgacacctgcggttgacgcatcagaccgctgctctgtcgctgagggttaagtaggcttgaggaaagggccggtgctctcagcgcaaaaagccttttgaacactgtcgagatgaagccggattcccttcgtggtcacagcgaagggatacgcaccacccggcgcttgccggagcattttccgaaaggagtttt

SEQ ID NO: 2061 - DNA, 37 bp, Artificial Sequence
  Synthetic
gaagaagaggccgcacccgtttgaggccgcaccaaat

SEQ ID NO: 2062 - DNA, 37 bp, Artificial Sequence
  Synthetic
caagctttttaacagtggccttattaaatgacttctc

SEQ ID NO: 2063 - protein, 496 aa, Unknown
  IscB protein sequence
MMAVVYVISKSGKPLMPTTRCGHVRILLKEGKARVVERKPFTIQLTYESAEETQPLVLGIDPGRTNIGMSVVTESGESVFNAQIETRNKDVPKLMKDRKQYRMAHRRLKRRCKRRRRAKAAGTAFEEGEKQRLLPGCFKPITCKSIRNKEARFNNRKRPVGWLTPTANHLLVTHLNVVKKVQKILPVAKVVLELNRFSFMAMNNPKVQRWQYQRGPLYGKGSVEEAVSMQQDGHCLFCKHGIDHYHHVVPRRKNGSETLENRVGLCEEHHRLVHTDKEWEANLASKKSGMNKKYHALSVLNQIIPYLADQLADMFPGNFCVTSGQDTYLFREEHGIPKDHYLDAYCIACSALTDAKKVSSPKGRPYMVHQFRRHDRQACHKANLNRSYYMGGKLVATNRHKAMDQKTDSLEEYRAAHSAADVSKLTVKHPSAQYKDMSRIMPGSILVSGEGKLFTLSRSEGRNKGQVNYFVSTEGIKYWARKCQYLRNNGGLQIYV

SEQ ID NO: 2064 - DNA, 206 bp, Artificial Sequence
  Synthetic
ggctcttccaactttatggttgcgaccgtaggttgaaagagcacaggctgagacattcgtaaggccgaaagaccggacgcaccctgggatttccccagtccccggaactgcatagcggatgccagttgatggagcaatctatcagataagccagggggaacaatcacctctctgtatcagagagagttttacaaaaggaggaacgg

SEQ ID NO: 2065 - DNA, 13 bp, Artificial Sequence
  Synthetic
gaacatatgagtg

SEQ ID NO: 2066 - DNA, 15 bp, Artificial Sequence
  Synthetic
gttaacatatgagtg

SEQ ID NO: 2067 - DNA, 17 bp, Artificial Sequence
  Synthetic
ggtttaacatatgagtg

SEQ ID NO: 2068 - DNA, 19 bp, Artificial Sequence
  Synthetic
gaagtttaacatatgagtg

SEQ ID NO: 2069 - DNA, 21 bp, Artificial Sequence
  Synthetic
gacaagtttaacatatgagtg

SEQ ID NO: 2070 - DNA, 23 bp, Artificial Sequence
  Synthetic
gaaacaagtttaacatatgagtg

SEQ ID NO: 2071 - DNA, 25 bp, Artificial Sequence
  Synthetic
gacaaacaagtttaacatatgagtg

SEQ ID NO: 2072 - DNA, 27 bp, Artificial Sequence
  Synthetic
gacacaaacaagtttaacatatgagtg

SEQ ID NO: 2073 - DNA, 24 bp, Artificial Sequence
  Synthetic
gatgtcttcctgggacgaagacaa

SEQ ID NO: 2074 - DNA, 13 bp, Artificial Sequence
  Synthetic
gtaggcatatgtc

SEQ ID NO: 2075 - DNA, 15 bp, Artificial Sequence
  Synthetic
gtctaggcatatgtc

SEQ ID NO: 2076 - DNA, 17 bp, Artificial Sequence
  Synthetic
gattctaggcatatgtc

SEQ ID NO: 2077 - DNA, 19 bp, Artificial Sequence
  Synthetic
gaaattctaggcatatgtc

SEQ ID NO: 2078 - DNA, 21 bp, Artificial Sequence
  Synthetic
gcaaaattctaggcatatgtc

SEQ ID NO: 2079 - DNA, 23 bp, Artificial Sequence
  Synthetic
gaccaaaattctaggcatatgtc

SEQ ID NO: 2080 - DNA, 25 bp, Artificial Sequence
  Synthetic
ggcaccaaaattctaggcatatgtc

SEQ ID NO: 2081 - DNA, 27 bp, Artificial Sequence
  Synthetic
gaagcaccaaaattctaggcatatgtc

SEQ ID NO: 2082 - DNA, 24 bp, Artificial Sequence
  Synthetic
gatgtcttcctgggacgaagacaa

SEQ ID NO: 2083 - DNA, 13 bp, Artificial Sequence
  Synthetic
ggagtgaacgaga

SEQ ID NO: 2084 - DNA, 15 bp, Artificial Sequence
  Synthetic
gaagagtgaacgaga

SEQ ID NO: 2085 - DNA, 17 bp, Artificial Sequence
  Synthetic
gaaaagagtgaacgaga

SEQ ID NO: 2086 - DNA, 19 bp, Artificial Sequence
  Synthetic
gcaaaaagagtgaacgaga

SEQ ID NO: 2087 - DNA, 21 bp, Artificial Sequence
  Synthetic
gatcaaaaagagtgaacgaga

SEQ ID NO: 2088 - DNA, 23 bp, Artificial Sequence
  Synthetic
gtcatcaaaaagagtgaacgaga

SEQ ID NO: 2089 - DNA, 25 bp, Artificial Sequence
  Synthetic
gcatcatcaaaaagagtgaacgaga

SEQ ID NO: 2090 - DNA, 27 bp, Artificial Sequence
  Synthetic
gagcatcatcaaaaagagtgaacgaga

SEQ ID NO: 2091 - DNA, 24 bp, Artificial Sequence
  Synthetic
gatgtcttcctgggacgaagacaa

SEQ ID NO: 2092 - DNA, 17 bp, Artificial Sequence
  Synthetic
gaaaagacgaggatgaa

SEQ ID NO: 2093 - DNA, 17 bp, Artificial Sequence
  Synthetic
gagacagcttaacagaa

SEQ ID NO: 2094 - DNA, 17 bp, Artificial Sequence
  Synthetic
ggtttaacatatgagtg

SEQ ID NO: 2095 - DNA, 17 bp, Artificial Sequence
  Synthetic
gcctaaggccccttttc

SEQ ID NO: 2096 - DNA, 17 bp, Artificial Sequence
  Synthetic
gagaaaaagaacctgaa

SEQ ID NO: 2097 - DNA, 17 bp, Artificial Sequence
  Synthetic
gccccggttggtcttac

SEQ ID NO: 2098 - DNA, 17 bp, Artificial Sequence
  Synthetic
gaaaagagtgaacgaga

SEQ ID NO: 2099 - DNA, 17 bp, Artificial Sequence
  Synthetic
gatagagcaagacaaga

SEQ ID NO: 2100 - DNA, 17 bp, Artificial Sequence
  Synthetic
gggaggctcaaagaggc

SEQ ID NO: 2101 - DNA, 17 bp, Artificial Sequence
  Synthetic
gcccttcagatcagctt

SEQ ID NO: 2102 - DNA, 17 bp, Artificial Sequence
  Synthetic
ggctgttcaggtctctg

SEQ ID NO: 2103 - DNA, 17 bp, Artificial Sequence
  Synthetic
gaaggccgcacagctag

SEQ ID NO: 2104 - DNA, 17 bp, Artificial Sequence
  Synthetic
gaatggtggaaacacag

SEQ ID NO: 2105 - DNA, 17 bp, Artificial Sequence
  Synthetic
gggacatggcagataat

SEQ ID NO: 2106 - DNA, 17 bp, Artificial Sequence
  Synthetic
gcctgactctgcaaagc

SEQ ID NO: 2107 - DNA, 17 bp, Artificial Sequence
  Synthetic
gaatagcagattattcc

SEQ ID NO: 2108 - DNA, 17 bp, Artificial Sequence
  Synthetic
gctagtcccttcccttt

SEQ ID NO: 2109 - DNA, 17 bp, Artificial Sequence
  Synthetic
gagctttttccctgcag

SEQ ID NO: 2110 - DNA, 17 bp, Artificial Sequence
  Synthetic
gtattatacctgcacga

SEQ ID NO: 2111 - DNA, 17 bp, Artificial Sequence
  Synthetic
gagaataagttgagaaa

SEQ ID NO: 2112 - DNA, 17 bp, Artificial Sequence
  Synthetic
gcttccttccaaggtca

SEQ ID NO: 2113 - DNA, 17 bp, Artificial Sequencr
  Synthetic
gtttctatctgtaaaat

SEQ ID NO: 2114 - DNA, 17 bp, Artificial Sequence
  Synthetic
gattttacctttttcaa

SEQ ID NO: 2115 - DNA, 17 bp, Artificial Sequence
  Synthetic
gaatttactttttgaaa

SEQ ID NO: 2116 - DNA, 17 bp, Artificial
  Synthetic
gcaaagcccaaagtggt

SEQ ID NO: 2117 - DNA, 17 bp, Artificial Sequence
  Synthetic
gagtgaatcacgtaaag

SEQ ID NO: 2118 - DNA, 17 bp, Artificial Sequence
  Synthetic
gttacaaaattctttgt

SEQ ID NO: 2119 - DNA, 17 bp, Artificial Sequence
  Synthetic
gattctaggcatatgtc

SEQ ID NO: 2120 - DNA, 17 bp, Artificial Sequence
  Synthetic
gcaaggcagagccacgg

SEQ ID NO: 2121 - DNA, 17 bp, Artificial Sequence
  Synthetic
gattcaattactaccca

SEQ ID NO: 2122 - DNA, 17 bp, Artificial Sequence
  Synthetic
gtttctatgacatatgc

SEQ ID NO: 2123 - DNA, 17 bp, Artificial Sequence
  Synthetic
gataattgtttctattc

SEQ ID NO: 2124 - DNA, 17 bp, Artificial Sequence
  Synthetic
gaggaggctgtaaatct

SEQ ID NO: 2125 - DNA, 17 bp, Artificial Sequence
  Synthetic
gcataaagtaacaaaac

SEQ ID NO: 2126 - DNA, 17 bp, Artificial Sequence
  Synthetic
gatgttcacaagatagt

SEQ ID NO: 2127 - DNA, 17 bp, Artificial Sequence
  Synthetic
gagtctggcaaggcaga

SEQ ID NO: 2128 - DNA, 17 bp, Artificial Sequence
  Synthetic
gacctgccctagaaata

SEQ ID NO: 2129 - DNA, 17 bp, Artificial Sequence
  Synthetic
gctaaaactaacctgcc

SEQ ID NO: 2130 - DNA, 17 bp, Artificial Sequence
  Synthetic
ggcagtgcatttcacta

SEQ ID NO: 2131 - DNA, 17 bp, Artificial Sequence
  Synthetic
gttaatggttttcacat

SEQ ID NO: 2132 - DNA, 17 bp, Artificial Sequence
  Synthetic
gagtggaagaaggagat

SEQ ID NO: 2133 - DNA, 17 bp, Artificial Sequence
  Synthetic
ggctctgcaggaacagg

SEQ ID NO: 2134 - DNA, 17 bp, Artificial Sequence
  Synthetic
gtaaaataaatttgctc

SEQ ID NO: 2135 - DNA, 17 bp, Artificial Sequence
  Synthetic
gagaaggcagctttctg

SEQ ID NO: 2136 - DNA, 17 bp, Artificial Sequence
  Synthetic
gtctggcagaagacact

SEQ ID NO: 2137 - DNA, 17 bp, Artificial Sequence
  Synthetic
gccagatttcttttctc

SEQ ID NO: 2138 - DNA, 17 bp, Artificial Sequence
  Synthetic
gaaaagacgaggatgaa

SEQ ID NO: 2139 - DNA, 17 bp, Artificial Sequence
  Synthetic
gagacagcttaacagaa

SEQ ID NO: 2140 - DNA, 17 bp, Artificial Sequence
  Synthetic
ggtttaacatatgagtg

SEQ ID NO: 2141 - DNA, 17 bp, Artificial Sequence
  Synthetic
gcctaaggccccttttc

SEQ ID NO: 2142 - DNA, 17 bp, Artificial Sequence
  Synthetic
gagaaaaagaacctgaa

SEQ ID NO: 2143 - DNA, 17 bp, Artificial Sequence
  Synthetic
gccccggttggtcttac

SEQ ID NO: 2144 - DNA, 17 bp, Artificial Sequence
  Synthetic
gaaaagagtgaacgaga

SEQ ID NO: 2145 - DNA, 17 bp, Artificial Sequence
  Synthetic
gatagagcaagacaaga

SEQ ID NO: 2146 - DNA, 17 bp, Artificial Sequence
  Synthetic
gggaggctcaaagaggc

SEQ ID NO: 2147 - DNA, 17 bp, Artificial Sequence
  Synthetic
gcccttcagatcagctt

SEQ ID NO: 2148 - DNA, 17 bp, Artificial Sequence
  Synthetic
ggctgttcaggtctctg

SEQ ID NO: 2149 - DNA, 17 bp, Artificial Sequence
  Synthetic
gaaggccgcacagctag

SEQ ID NO: 2150 - DNA, 17 bp, Artificial Sequence
  Synthetic
gaatggtggaaacacag

SEQ ID NO: 2151 - DNA, 17 bp, Artificial Sequence
  Synthetic
gggacatggcagataat

SEQ ID NO: 2152 - DNA, 17 bp, Artificial Sequence
  Synthetic
gcctgactctgcaaagc

SEQ ID NO: 2153 - DNA, 17 bp, Artificial Sequence
  Synthetic
gaatagcagattattcc

SEQ ID NO: 2154 - DNA, 17 bp, Artificial Sequence
  Synthetic
gctagtcccttcccttt

SEQ ID NO: 2155 - DNA, 17 bp, Artificial Sequence
  Synthetic
gagctttttccctgcag

SEQ ID NO: 2156 - DNA, 17 bp, Artificial Sequence
  Synthetic
gtattatacctgcacga

SEQ ID NO: 2157 - DNA, 17 bp, Artificial Sequence
  Synthetic
gagaataagttgagaaa

SEQ ID NO: 2158 - DNA, 17 bp, Artificial Sequence
  Synthetic
gcttccttccaaggtca

SEQ ID NO: 2159 - DNA, 17 bp, Artificial Sequence
  Synthetic
gtttctatctgtaaaat

SEQ ID NO: 2160 - DNA, 17 bp, Artificial Sequence
  Synthetic
gattttacctttttcaa

SEQ ID NO: 2161 - DNA, 17 bp, Artificial Sequence
  Synthetic
gaatttactttttgaaa

SEQ ID NO: 2162 - DNA, 17 bp, Artificial Sequence
  Synthetic
gcaaagcccaaagtggt

SEQ ID NO: 2163 - DNA, 17 bp, Artificial Sequence
  Synthetic
gagtgaatcacgtaaag

SEQ ID NO: 2164 - DNA, 17 bp, Artificial Sequence
  Synthetic
gttacaaaattctttgt

SEQ ID NO: 2165 - DNA, 17 bp, Artificial Sequence
  Synthetic
gattctaggcatatgtc

SEQ ID NO: 2166 - DNA, 17 bp, Artificial Sequence
  Synthetic
gcaaggcagagccacgg

SEQ ID NO: 2167 - DNA, 17 bp, Artificial Sequence
  Synthetic
gattcaattactaccca

SEQ ID NO: 2168 - DNA, 17 bp, Artificial Sequence
  Synthetic
gtttctatgacatatgc

SEQ ID NO: 2169 - DNA, 17 bp, Artificial Sequence
  Synthetic
gataattgtttctattc

SEQ ID NO: 2170 - DNA, 17 bp, Artificial Sequence
  Synthetic
gaggaggctgtaaatct

SEQ ID NO: 2171 - DNA, 17 bp, Artificial Sequence
  Synthetic
gcataaagtaacaaaac

SEQ ID NO: 2172 - DNA, 17 bp, Artificial Sequence
  Synthetic
gatgttcacaagatagt

SEQ ID NO: 2173 - DNA, 17 bp, Artificial Sequence
  Synthetic
gagtctggcaaggcaga

SEQ ID NO: 2174 - DNA, 17 bp, Artificial Sequence
  Synthetic
gacctgccctagaaata

SEQ ID NO: 2175 - DNA, 17 bp, Artificial Sequence
  Synthetic
gctaaaactaacctgcc

SEQ ID NO: 2176 - DNA, 17 bp, Artificial Sequence
  Synthetic
ggcagtgcatttcacta

SEQ ID NO: 2177 - DNA, 17 bp, Artificial Sequence
  Synthetic
gttaatggttttcacat

SEQ ID NO: 2178 - DNA, 17 bp, Artificial Sequence
  Synthetic
gagtggaagaaggagat

SEQ ID NO: 2179 - DNA, 17 bp, Artificial Sequence
  Synthetic
ggctctgcaggaacagg

SEQ ID NO: 2180 - DNA, 17 bp, Artificial Sequence
  Synthetic
gtaaaataaatttgctc

SEQ ID NO: 2181 - DNA, 17 bp, Artificial Sequence
  Synthetic
gagaaggcagctttctg

SEQ ID NO: 2182 - DNA, 17 bp, Artificial Sequence
  Synthetic
gtctggcagaagacact

SEQ ID NO: 2183 - DNA, 17 bp, Artificial Sequence
  Synthetic
gccagatttcttttctc

SEQ ID NO: 2184 - DNA, 20 bp, Artificial Sequence
  Synthetic
cggttccgcaggacccaggg

SEQ ID NO: 2185 - DNA, 20 bp, Artificial Sequence
  Synthetic
cccccttccctatgggaata

SEQ ID NO: 2186 - DNA, 20 bp, Artificial Sequence
  Synthetic
agtggtgcctggaaaataaa

SEQ ID NO: 2187 - DNA, 20 bp, Artificial Sequence
  Synthetic
actacagtggtgcctggaaa

SEQ ID NO: 2188 - DNA, 20 bp, Artificial Sequence
  Synthetic
cccccttccctatgggaata

SEQ ID NO: 2189 - DNA, 20 bp, Artificial Sequence
  Synthetic
atgcatataccagtttgtgg

SEQ ID NO: 2190 - DNA, 20 bp, Artificial Sequence
  Synthetic
accgggaagtgaatggacgt

SEQ ID NO: 2191 - DNA, 20 bp, Artificial Sequence
  Synthetic
acgaatttctgcaaacagaa

SEQ ID NO: 2192 - DNA, 20 bp, Artificial Sequence
  Synthetic
ctccaaggacaaatctttat

SEQ ID NO: 2193 - DNA, 20 bp, Artificial Sequence
  Synthetic
tttattttagctgaagggaa

SEQ ID NO: 2194 - DNA, 20 bp, Artificial Sequence
  Synthetic
ccaagcaagaagtgaagccc

SEQ ID NO: 2195 - DNA, 20 bp, Artificial Sequence
  Synthetic
tttatttcccttcagctaaa

SEQ ID NO: 2196 - DNA, 20 bp, Artificial Sequence
  Synthetic
tcccaaagatgcccacctgc

SEQ ID NO: 2197 - DNA, 20 bp, Artificial Sequence
  Synthetic
gagagcaaaagatacatctc

SEQ ID NO: 2198 - DNA, 20 bp, Artificial Sequence
  Synthetic
atcaaaaagagtgaacgaga

SEQ ID NO: 2199 - DNA, 20 bp, Artificial Sequence
  Synthetic
atttgtaccggtttttgtat

SEQ ID NO: 2200 - DNA, 20 bp, Artificial Sequence
  Synthetic
tggtggtctggataaaagaa

SEQ ID NO: 2201 - DNA, 20 bp, Artificial Sequence
  Synthetic
tgtgcccattggtggtctgg

SEQ ID NO: 2202 - DNA, 20 bp, Artificial Sequence
  Synthetic
cgcagagagtcgccgtctcc

SEQ ID NO: 2203 - DNA, 20 bp, Artificial Sequence
  Synthetic
tattcctgacactgccagga

SEQ ID NO: 2204 - DNA, 20 bp, Artificial Sequence
  Synthetic
tttaaagaaaaagcagcttt

SEQ ID NO: 2205 - DNA, 20 bp, Artificial Sequence
  Synthetic
gggacagaaaacctagaaaa

SEQ ID NO: 2206 - DNA, 20 bp, Artificial Sequence
  Synthetic
tctgtccctccctcagtagt

SEQ ID NO: 2207 - DNA, 20 bp, Artificial Sequence
  Synthetic
tttaagagcatcgaacaata

SEQ ID NO: 2208 - protein, 386 aa, Artificial Sequence
  Synthetic
  MISC_FEATURE (1)..(2): Xaa represents any naturally occurring amino acid
  MISC_FEATURE (4)..(4): Xaa represents any naturally occurring amino acid
  MISC_FEATURE (7)..(11): Xaa represents any naturally occurring amino acid
  MISC_FEATURE (16)..(20): Xaa represents any naturally occurring amino acid
  MISC_FEATURE (23)..(23): Xaa represents any naturally occurring amino acid
  MISC_FEATURE (26)..(27): Xaa represents any naturally occurring amino acid
  MISC_FEATURE (31)..(31): Xaa represents any naturally occurring amino acid
  MISC_FEATURE (33)..(36): Xaa represents any naturally occurring amino acid
  MISC_FEATURE (41)..(41): Xaa represents any naturally occurring amino acid
  MISC_FEATURE (43)..(50): Xaa represents any naturally occurring amino acid
  MISC_FEATURE (52)..(54): Xaa represents any naturally occurring amino acid
  MISC_FEATURE (57)..(57): Xaa represents any naturally occurring amino acid
  MISC_FEATURE (59)..(59): Xaa represents any naturally occurring amino acid
  MISC_FEATURE (63)..(64): Xaa represents any naturally occurring amino acid
  MISC_FEATURE (66)..(78): Xaa represents any naturally occurring amino acid
  MISC_FEATURE (80)..(82): Xaa represents any naturally occurring amino acid
  MISC_FEATURE (84)..(85): Xaa represents any naturally occurring amino acid
  MISC_FEATURE (87)..(89): Xaa represents any naturally occurring amino acid
  MISC_FEATURE (91)..(92): Xaa represents any naturally occurring amino acid
  MISC_FEATURE (94)..(96): Xaa represents any naturally occurring amino acid
  MISC_FEATURE (98)..(98): Xaa represents any naturally occurring amino acid
  MISC_FEATURE (101)..(101): Xaa represents any naturally occurring amino acid
  MISC_FEATURE (103)..(104): Xaa represents any naturally occurring amino acid
  MISC_FEATURE (108)..(109): Xaa represents any naturally occurring amino acid
  MISC_FEATURE (112)..(112): Xaa represents any naturally occurring amino acid
  MISC_FEATURE (115)..(118): Xaa represents any naturally occurring amino acid
  MISC_FEATURE (122)..(122): Xaa represents any naturally occurring amino acid
  MISC_FEATURE (125)..(143): Xaa represents any naturally occurring amino acid
  MISC_FEATURE (146)..(154): Xaa represents any naturally occurring amino acid
  MISC_FEATURE (157)..(157): Xaa represents any naturally occurring amino acid
  MISC_FEATURE (159)..(169): Xaa represents any naturally occurring amino acid
  MISC_FEATURE (172)..(172): Xaa represents any naturally occurring amino acid
  MISC_FEATURE (174)..(176): Xaa represents any naturally occurring amino acid
  MISC_FEATURE (174)..(179): Xaa represents any naturally occurring amino acid
  MISC_FEATURE (180)..(181): Xaa represents any naturally occurring amino acid
  MISC_FEATURE (185)..(185): Xaa represents any naturally occurring amino acid
  MISC_FEATURE (187)..(192): Xaa represents any naturally occurring amino acid
  MISC_FEATURE (194)..(195): Xaa represents any naturally occurring amino acid
  MISC_FEATURE (197)..(202): Xaa represents any naturally occurring amino acid
  MISC_FEATURE (204)..(206): Xaa represents any naturally occurring amino acid
  MISC_FEATURE (209)..(213): Xaa represents any naturally occurring amino acid
  MISC_FEATURE (216)..(220): Xaa represents any naturally occurring amino acid
  MISC_FEATURE (223)..(225): Xaa represents any naturally occurring amino acid
  MISC_FEATURE (223)..(228): Xaa represents any naturally occurring amino acid
  MISC_FEATURE (230)..(256): Xaa represents any naturally occurring amino acid
  MISC_FEATURE (258)..(274): Xaa represents any naturally occurring amino acid
  MISC_FEATURE (276)..(277): Xaa represents any naturally occurring amino acid
  MISC_FEATURE (280)..(281): Xaa represents any naturally occurring amino acid
  MISC_FEATURE (283)..(288): Xaa represents any naturally occurring amino acid
  MISC_FEATURE (290)..(290): Xaa represents any naturally occurring amino acid
  MISC_FEATURE (292)..(293): Xaa represents any naturally occurring amino acid
  MISC_FEATURE (296)..(319): Xaa represents any naturally occurring amino acid
  MISC_FEATURE (321)..(322): Xaa represents any naturally occurring amino acid
  MISC_FEATURE (324)..(331): Xaa represents any naturally occurring amino acid
  MISC_FEATURE (333)..(336): Xaa represents any naturally occurring amino acid
  MISC_FEATURE (338)..(338): Xaa represents any naturally occurring amino acid
  MISC_FEATURE (340)..(342): Xaa represents any naturally occurring amino acid
  MISC_FEATURE (344)..(349): Xaa represents any naturally occurring amino acid
  MISC_FEATURE (351)..(354): Xaa represents any naturally occurring amino acid
  MISC_FEATURE (356)..(386): Xaa represents any naturally occurring amino acid
XXVXVLXXXXXPLMPXXXXXARXLLXXGKAXVXXXXPFTIXLXXXXXXXXQXXXLGXDXGSKXXGXXXXXXXXXXXXXEXXXRXXIXXXLXXRXXXRXRRXRXXRYRXXRFXNRXXXXGWLXPSXXXXXXXXXXXXXXXXXXXPIXXXXXEXXXFDXQXXXNPXIXGXXYQXGXXXGXXXXREYXLXXXXXXCXXCXXXXXXLXXXHIXXXXXGGXXXXXNLXXXCXXCXXXXXXXXXXXXXXXXXXXXXXXXXXXRXXXXXXXXXXXXXXXXXGXXTKXXRXXXXXXKXHXXDAXXXXXXXXXXXXXXXXXXXXXXXXRXXGXXXXXXXXGXXXXDXVXXXGXXXXXXGXXXXGXXXXXXXXXXXXXXXXXXXXXXXXXXXXXXX

SEQ ID NO: 2209 - DNA, 40 bp, Artificial Sequence
  Synthetic
gcaaagcatcatcaaaaagagtgaacgagactagaagtct

SEQ ID NO: 2210 - DNA, 36 bp, Artificial Sequence
  Synthetic
gcaaagcatcatcaaaaagagtgagactagaagtct

SEQ ID NO: 2211 - DNA, 36 bp, Artificial Sequence; identical to SEQ ID NO: 2210
  Synthetic

SEQ ID NO: 2212 - DNA, 35 bp, Artificial Sequence
  Synthetic
gcaaagcatcatcaaaaagacgagactagaagtct

SEQ ID NO: 2213 - DNA, 34 bp, Artificial Sequence
  Synthetic
gcaaagcatcatcaaaaagagagactagaagtct

SEQ ID NO: 2214 - DNA, 34 bp, Artificial Sequence; identical to SEQ ID NO: 2213
  Synthetic

SEQ ID NO: 2215 - DNA, 33 bp, Artificial Sequence
  Synthetic
gcaaagcatcatcaaaaagaagactagaagtct

SEQ ID NO: 2216 - DNA, 32 bp, Artificial Sequence
  Synthetic
gcaaagcatcatcaaaaagagactagaagtct

SEQ ID NO: 2217 - DNA, 31 bp, Artificial Sequence
  Synthetic
gcaaagcatcatcactcgagactagaagtct

SEQ ID NO: 2218 - DNA, 31 bp, Artificial Sequence
  Synthetic
gcaaagcatcatcaaacgagactagaagtct

SEQ ID NO: 2219 - DNA, 28 bp, Artificial Sequence
  Synthetic
gcaaagcatcatacgagactagaagtct

SEQ ID NO: 2220 - DNA, 27 bp, Artificial Sequence
  Synthetic
gcaaagcatcatcgagactagaagtct

SEQ ID NO: 2221 - DNA, 27 bp, Artificial Sequence
  Synthetic
gcaaagcatcatcgagactagaagtct

SEQ ID NO: 2222 - DNA, 25 bp, Artificial Sequence
  Synthetic
gcaaagcatcatcaactagaagtct

SEQ ID NO: 2223 - DNA, 23 bp, Artificial Sequence
  Synthetic
gcaaagcatcagactagaagtct

SEQ ID NO: 2224 - DNA, 65 bp, Ktedonobacter racemifer
  MISC_FEATURE: Any "n" represents any nucleotide
  MISC_FEATURE (48)..(55): Any "n" represents any nucleotide
cttgcgggatgaagaagaggccgcacccgtttgaggccgcaccaaatnnnnnnnnatcgtccatt

SEQ ID NO: 2225 - DNA, 65 bp, Ktedonobacter racemifer
  MISC_FEATURE (11)..(18): Any "n" represents any nucleotide
aatggacgatnnnnnnnnatttggtgcggcctcaaacgggtgcggcctcttcttcatcccgcaag

SEQ ID NO: 2226 - RNA, 47 nt, Ktedonobacter racemifer
gggaagaagaggkccgcacccguuugaggccgcaccaaaugugaacu

SEQ ID NO: 2227 - DNA, 65 bp, Artificial Sequence
  Synthetic
  MISC_FEATURE (48)..(55): Any "n" represents any nucleotide
atgattacgccaagctttttaacagtggccttattaaatgacttctcnnnnnnnncccgggtacc

SEQ ID NO: 2228 - DNA, 65 bp, Artificial Sequence
  Synthetic
  MISC_FEATURE (11)..(18): Any "n" represents any nucleotide
ggtacccgggnnnnnnnngagaagtcatttaataaggccactgttaaaaagcttggcgtaatcat

SEQ ID NO: 2229 - RNA, 46 nt, Artificial Sequence
  Synthetic
ggcaagcuuuuuaacaguggccuuauuaaaugacuucucgugaacu

SEQ ID NO: 2230 - DNA, 46 bp, Allochromatium warmingii
tttaacagtggccttattaaatgacttctcatgagatcatcgtcca

SEQ ID NO: 2231 - DNA, 46 bp, Allochromatium warmingii
tggacgatgatctcatgagaagtcatttaataaggccactgttaaa

SEQ ID NO: 2232 - DNA, 46 bp, Allochromatium warmingii; identical to SEQ ID NO: 2230

SEQ ID NO: 2233 - DNA, 46 bp, Allochromatium warmingii; identical to SEQ ID NO: 2231

SEQ ID NO: 2234 - DNA, 46 bp, Allochromatium warmingii; identical to SEQ ID NO: 2230

SEQ ID NO: 2235 - DNA, 46 bp, Allochromatium warmingii; identical to SEQ ID NO: 2231

SEQ ID NO: 2236 - DNA, 46 bp, Allochromatium warmingii; identical to SEQ ID NO: 2230

SEQ ID NO: 2237 - DNA, 46 bp, Allochromatium warmingii; identical to SEQ ID NO: 2231

SEQ ID NO: 2238 - RNA, 25 nt, Allochromatium warmingii
ggccuuauuaaaugacuucucguca

SEQ ID NO: 2239 - DNA, 46 bp, Allochromatium warmingii; identical to SEQ ID NO: 2230

SEQ ID NO: 2240 - DNA, 46 bp, Allochromatium warmingii; identical to SEQ ID NO: 2231

SEQ ID NO: 2241 - DNA, 46 bp, Streptococcus pyogenes
tttaacagtggccttattaaatgacttctctggttaatatcgtcca

SEQ ID NO: 2242 - DNA, 46 bp, Streptococcus pyogenes
tggacgatattaaccagagaagtcatttaataaggccactgttaaa

SEQ ID NO: 2243 - RNA, 26 nt, Streptococcus pyogenes
gggccuuauuaaaugacuucucguuu

SEQ ID NO: 2244 - DNA, 46 bp, Streptococcus pyogenes; identical to SEQ ID NO: 2241

SEQ ID NO: 2245 - DNA, 46 bp, Streptococcus pyogenes; identical to SEQ ID NO: 2242

SEQ ID NO: 2246 - DNA, 28 bp, Human gut metagenome
tcatcaaaaagagtgaacgagactagaa

SEQ ID NO: 2247 - DNA, 30 bp, Human gut metagenome
tcatcaaaaagagtgaacgcgagactagaa

SEQ ID NO: 2248 - DNA, 31 bp, Human gut metagenome
tcatcaaaaagagtgaacgacgagactagaa

SEQ ID NO: 2249 - DNA, 32 bp, Human gut metagenoume
tcatcaaaaagagtgaacgaacgagactagaa

SEQ ID NO: 2250 - DNA, 15 bp, Human gut metagenome
tcatcgagactagaa

SEQ ID NO: 2251 - DNA, 20 bp, Human gut metagenome
tcatcaaaacgagactagaa

SEQ ID NO: 2252 - DNA, 22 bp, Human gut metagenome
tcatcaaaaagagagactagaa

SEQ ID NO: 2253 - DNA, 27 bp, Human gut metagenome
tcatcaaaaagagtgacgagactagaa

SEQ ID NO: 2254 - DNA, 17 bp, Human gut metagenome
tcatcacgagactagaa

SEQ ID NO: 2255 - protein, 199 aa, Unknown
  Ga0207030_1011_-_->_pfam14239(3,96)[74.0]
MSVFVLDKKKNPLMPCSEKRARLLLQRGRAVVIRVYPFTIRLKDRVGGETQDLRLGIDPRSKTTGLMLARECEKIDSESGEIKRTRLTARGFPRGYLLRKKSVNGFQTGDMVIADIPKGVKSGVHVGRVAIRSSGYFNIQSTKNVIQGVSHRHCKMMQRADGYGYSIVAQQKEVSGNLGHASRAALSIPGMNAEVSRAI

SEQ ID NO: 2256 - protein, 325 aa, Unknown
  0137383_10000411_-_->_IscB_BH_Trimmed_Muscle(80,148)[57.0]
MVFVLDRHKKPLMPCTPRRARLLLARRRAVVHRIRPFVIRLRDRRTQDSVLQESVLKIDPGSRTSGMTLVRAEETPAGEVHHALFCSEVQHRGELVHRGKQTQSNARRRRRSATLRHRAPRFDNRAVAKGWLPPSMCSRVGNILTWARRYSRWVPVGTWTGGRTRWNRARLGIAKTHANDALCVGEIAGVKLLRLKTLRIKATGRGEHCRTNWTAEGFPRGYKMRQKQVRGFKTGDLVRAEVPEPLTTAGIHLGRVAVRASGSFRVGKVDGIHARYGVLVQRADGYEYEWTEQQNRRLFPTPAPRKGTPASSPSLKSGASAGGDW

SEQ ID NO: 2257 - protein, 325 aa, Human gut metagenome
MRVFVLNKRGQPLMPCSPAKARLLLKEKKAIVKRRTPFTIQLTIATGEARQPVTLGVDSGYKHIGLSATTEKAELYASEVELRQDITDLLSARLALRRSRRSRKTRYRAPRFDNRVASKREGWLAPSVENRIAAHMSRVEAVMQVLPVTAITVETAAFDTQLLKNPDIAGEAYQQGEQLGFWNVREYVLFRDGHVCQHCRGKSKDPILNVHHIESRRTGGDAPNNLITLCETCHKAFHRGEIELKVRRGKSFKAETFMGIMRWTLFERLKKAHPELRVRNTYGYLTKHKRISHGIAKSHCADAYCIADNLGAKRLEGFFFQKQTR

SEQ ID NO: 2258 - protein, 475 aa, Unknown
  335256_-_->_IscB_BH_Trimmed_Muscle(70,169)[47.7]
MKPVYVVGYNGQGLMPTTPRKARKLVESGRAVVLFKTPYTIKLLYKTGVNTQPTFEGTDTGSQHIGVAVTTDEKVLSKEEYALRSTMDKRALIETRASYRKGRRYRKTRYRHPKFRPHTKRVYVEKPVRYNKHLTHWKKCKNVFASSKKKGWLPPSIQSKCDMTMQIIDRYKMILPPKTRFRHEVGRFDIARIKDPSIHGEMYQYGRLYDEENVRAYVFERDGYTCKVCKKKAGSKRKDGSTVKLAAHHIDFRSKGATDNPDRMITVCDGCHTTVNHQKGGILYQWMLDEKKVARGYRDETFMNIIRRKLFKEFPNDEFTYGNFTAADRKTLGLEKTHANDAVAIACQGRPVKDNPDTTYYQQVRHNKRSLHEATARKGRKEPNRRQIRNAKNTKSVTIGRYNSKKTFYVYDKVSYKGQVGWISGFTKTAAYVKDKDDNYIKYPDKSYNQINLSDLSVISHNDNWLIGAVSPIGK

SEQ ID NO: 2259 - protein, 463 aa, Unknown
  a0210056_1025515_-_->_IscB_BH_Trimmed_Muscle(124,198)[77.1
MQKLLVELKNAPTDVPQVCSSVSPVLNSPCEVMDSVQDIQLANNNSDVDQLGNRRNTLLVVFTLNKNGKPLMPCKPAKARHLLKEGKAKVVRGQPFTIQLLYGSGTAIQPIILGIDPGYDKIGFSAITDKKELISGEVRLRKDVSAKLTERRMYRRNRRNKLWYRKPRFLNRVSKKENWLAPSIRYKLDSHISLINKIKEILPISDTIVEIASFDAQKIVNPEISSIKYQQGELQGYEIREYLLEKWGRKCAYCGKKDIPLEVEHIIPKSRGGTDRVSNLTLSCQKCNLKKGNRTAKEFGYPEIQKQGKESLKATAFMNNVRWRLVNILNCKWTYGYKTKHDRIKLGLEKSHSNDAFTIAGGNKQLGSVQYIGNRYRRNDRSLQLNRKGFTPSIRRQRYNLQPHSLVKWNNQLLRIRGISCKGARVVLENKKSVKIDSVQLYKYMRGWQLFPDINDGVSLLQN

SEQ ID NO: 2260 - protein, 435 aa, Geitlerinema sp. FC II
MSNFVFVLDTKRQPLAPCHPARARELLAKGKAAIYRRYPFTIVLNRAVGDVPPSYQLKIDPGSQTTGLALVNRSQLVWGAELQHRGARIKAKLATRRVCRRNRRNRKTRYRKPRFLNRTRPKGWLPPSLNHRVETTMTWVNRLRKLCPIVCVSQELVRFDTQKLQNPEVSGIEYQQGELLGYEVREYVLQKWGRKCVYCGVENVPLEVEHIQPQSKGGSDRVSNLTLACRPCNQSKGNRDVREFLLEKPSVLERILRQAKTPLKDAAAVNATRWQLYQRLKETGLPVEVGTGGLTKFNRTRLGLPKAHWLDAACVGETPSLHLATETPIAILSKGHSTRFRTLIDRYGFPRAVRQTKAQVNGLQAGDIVRAIVPNGKYRGQWTGAIAGVRKKRPPALRPFGKKQIDLTAQTQIQIVHKQDGYEYDINSCGHSSRR

SEQ ID NO: 2261 - protein, 277 aa, Unknown
  a0307954_1000334_-_->_IscB_BH_Trimmed_Muscle(72,144)[89.7
MAVFVLDRQKNPLMPCSEKRARLLLTRRRAVVVRAYPFTIRLKDRAGGAVQKVVLKIDPGSKETGLAVSRVSAQGEHVLCLIELTHRGHQISKALDQRRGFRSRRRGQLRYRAPRFSNRTKPKGWLAPSLQHRVDTTASIVNRLCTLVPVSSISQELVRFDLQQMENPEISGVEYQQGTLLGYEVREYLLEKWGLECAYCAVTDTPLEIEHIVPKSNGGSNRISNLTLACHDCNQEKGSQTLAEFFQTSSRLKDKQPRMDNVLIQCKRPLRDAAAVN

SEQ ID NO: 2262 - protein, 216 aa, Unknown
  a0373633_0030533_-_->_pfam14239(5,83)[54.9]
MVLSVFVLDNRGVAVMPCTQKRARLLLARGRARVHRLVPFVIRSVDVKAQDCSLQPLSLKIDPGSKTMCQRPMRWMRRVSVRWTGYRPSLHIKSTGRGSYQRTRLDAFGFPRGYLMRNKSVKGFATGDLVKATVTHGKKQGGYRGRVAIRATGSFNIQTREGVVQGVSHRHCTLLQRGDGYGYQQQSKSDAGRDRASHDALCLPGMNAGVSRAIQG

SEQ ID NO: 2263 - protein, 424 aa, Unknown
  a0376687_0042770_-_->_pfam14279(13,65)[44.2]
MLRTVRQPGNGALIRGHRKESPMVFVLDQHKKPLMPCTPRRARLLLARKRAVVHRLSPFTIRRHRTAASRRARCNRWSSRSIPVRRPPAWPWRGSRRRMRGRCTTRCILPSSPIGEKRSASVCANGRSIAAAGVRPTCATGQPASSTVAVRPAGFLRRCAHGSTTSCPGLPATGAGSRWCAWRSSASSSTPRGSQNPEISGVEYQRGELAGWEVRSYLLEKFEHRCAYCGRTDTPFELDHIQSRSRGGSDRVSNLALSCHACNVAKGDHTAAEFGHPEVAAQAKQPLRDAAAVNATRVALCDELRKLGLPLTSLVWRTHALEPGALRDPQDPRTGCGCRVGALAGVSASRHKTLAIKATGRGRYSRTNVDEHGFPVGYLMRHKQVMGIKTGDRVLQFADGYDYALVDTGSEHVAVAPPPTLCPP

SEQ ID NO: 2264 - protein, 278 aa, Unknown
  0172375_10015289_-_->_cas9(114,151)[29.3
MASRRSLRRGRRTRKTRYRQARFLNRKRNQGWLPPSLESRVLNVNSWVNRLRRLAPVSSISLELVKFDTQKLQNPEVSGVEYQQGELLGYEVREYLLEKWGRKCAYCKTANVPLQIEHIVPKIRGGTNRVSNLTLACESCNQAKGNLTAAEFGHPGIQSQARMPLKDAAAVNATRWALFNQLKGLGLPVEMGSGGRTKFNRVRQGYPKAHWIDAACVGESGSKINIPSWAIPVQIKAVGHGSRQRCGTDKYGFPVRHAPKAKSFMGYQTGDIVQANIP

SEQ ID NO: 2265 - protein, 486 aa, Unknown
  a0180732_1000856_-_->_pfam14239(3,210)[179.7]
MKVYVISKSGKPLMPTERFGKVRRLLKSGKAKVVHRKPFTIQLLYETTEIVQPLILGVDTGANDIGVVVTKEDGEPVFLGELETRTIEVAQNMKDRCEHRRARRRHRREKRKRRAKAAGTIFEKKKYHINGCEEAITCKLIKPGMVRFENRKRADKWLTPTCTHLLQTHINFIKKIAKILPIAIVNFEYAKFDLHKINNPDVKGKDYQNGRKKGYVNTAEYVLCRDKHSCQLCKVKSGKMRVHHVIWQSENGSDTPENLVTLCEKCHEKVHNNQKADKKIKGLFEGIKKKYVHATILNSVLPKLFQWLKSTFENVNKTYGYETKEKRWEYNLPKSHVVDAYLIAIGDNPPHDLTSCESFLFKQFRRHNRANIKRQEDRKYYIGKKKVAVNRNKRTGQTFDSLKDLVTKCAEHETVLNLLTVKPATRPKRSTKPFGMGDVVKFRGGIHIVKGFTGNYLGFVDAADGKYNKNIKEAELVIKNQGIVCI

SEQ ID NO: 2266 - protein, 441 aa, Human oral metagenome
MSMSLTYVLDKNGQPLMPTQRCGKVYRLLKSGKAKVVQREPFTIKLLYEPETHIVQDLTLGVDTGSSKIGTAVVDNDANVYYASKVTIRNDISNKMSRRRIYRRARRTRKLRYRPVRFSNRKNSTKKDRFSPTMVSKINSHIREIEFVKSILPVKTLVIETGTFDPHLLEHIEDGIAFNKHWGYQKGSNYGFANSREACLNRDNYTCQCCGAKNTRLEVHHIIYRSKGGSDELVNLITLCEKCHKLLHDGKLKEFESKLSGKRKGILKHATQMNSIRIQLLRHYPEAIETFGFMTKENRQSSDLEKSHVNDAIIISTGCITKPKYKTEVYYKKKCIPRGDYAVTLYAGQGKKNKLGKTTKPRNTRPVYGFRKHDKVEYCNTICFLKSLRFAGNGPLMDIDGNILKFRERYGKADTTSVKNLKRISARKNCLCTKVTFLCTS

SEQ ID NO: 2267 - protein, 496 aa, Unknown
  a0307930_1006096_-_->_COG1403(194,267)[37.8]
MIYIVDARNKIGHPTKKHDMVGRLIRNERAKIIKRLNKDVMIVQLLTKVFSKSETIDCEFRIGIDPGYANIGFAVFKIHGNIITKLIKGEACLRTKKIKEGLDAKRMYRRSRRYLARKNIKKKYGTGRAKFKHPAWKNRSKHKFQPTHLHVIQSHENVLAKLLKLIPIEQVKIHLEYNNFDIHKMINPKIQSFWYQKGLQFGFENVKSYVRNRDNYQCQICKKDVGSIRNEVHHIKWKSTGGSDRPENLILLCEVCHNKVHKKGLNCPDKSISVNGYRNAGVLNSVMGTIWSRFENQCPVQDTYGYITSGVRNRDNIIKSHASDASVIAFNDSLGSQNIEDYSWKDYNSKLNMNQFPRHTRSFTLRHTDRRYTILNSNLPGKKKTVVAWNRKRRAGQDPKKQSLAELKQSLMIDGTLNSTVIVAIPGQKVMRSLITDYTIRKGDVVNVGSMIKVCKGVQNKGTVVTFENDLNPKKLDTFGTKKCHKIINNCGLVTY

SEQ ID NO: 2268 - protein, 442 aa, Ktedonobacter sp. 13_2_20CM_2_56_8
MSKVLLLDMTKQPLDPVHPGRARLLLKEGKAAVYRRYPFTLILKTQVDSPAVSALRLKLDPGAKTSGLALVDDASGEVVWAAELGHRGASIKKRIDARRGVRRKRRSRFTRYRKPRFHNRRSSRRKGRLPPSLESRVANMLTWVGRLRRLCPIEVISMELVKFDMQAMQNPEITGAQYQQGERMGYETREYLLAKWGRRCAYCGAEDVPLEIEHILCRARGGTHRVSNLTLACEPCNVKKGTQLIEDFLNKKPDVLARILAQAKTPLKAAAAVNATRWHLFERLKATGLPLETSSGGLTKYNRAKRHLPKTHWLDAACVGQSTPKPLETSQVVPLLIEATGHGNRQMCGVDEHGFPIRHRQRKKVHFGYQTGDLVRAVVPTGARAGTHVGRVLARASGSFDLRTKAGRQAGISYRYCRPIHRNDGYRYQQGGRHAVPATQST

SEQ ID NO: 2269 - protein, 528 aa, Unknown
  a0182741_1016627_-_->_pfam14239(1,185)[194.8]
VLPQPRTLETAPADTAGVATKRGAVDGIRPTTGVQHGRGETTREGGGTPDPVPAGRAAGAGDRTITSRVFVLDRKGRPLMPTHPARARELLRKGRARVHRLTPFTIRLVDVDATDPGVVVDGVELGIDPGSKTTGMALFVTDASGNRTAVSLIELVHRGLAIKMSLSKRAALRRGRRSRNLRYRAPRFDNRTRKPADGLDVWLPPSVRHRVVTTVAWLDRLARLAPITRVHVESARFDTHLLHEPEVSGVGYQQGTLAGTEAREYLLAKYQHRCVYCDATGVVLNLDHVRPRSRGGSNRVSNLVTACVPCNEAKDNLPVEQFLAHDPARLARVLAGLKKPLRDAAAMNSTRHALVGAIASRGFDPVTATGGRTKWNRTRFGVPKTHALDALCVGEVGGVSGWPSTTLAVTATGRGSYARTRSDRHGFPRLRLTRVKRHHGFATGDLVRAVVPTGKKAGTHFGRVAVRATGSFNITTSAGTVQGIHHRHVRLLQRADGYTYATMKEGVGTRGSAYPSPRLKPGVSRRTR

SEQ ID NO: 2270 - protein, 436 aa, Unknown
  0164242_10000581_-_->_IscB_BH_Trimmed_Muscle(77,145)[73.6]
MSVFVLDKKGRALMPCSEKRARLLLTRRKAFVKVMQPFTIQLKERLLEDSELQSVELKLDPGSRHTGMALVRDAEGIKYCLNLYQLDHCGQMIHRKLLRRAMYRKQRRSRKTRYRQARFLNRRKPKGWLAPSLMHRVNSTLSWALKFQRWVPLTKLVVERNRFDIQKLQRPEIKGIEYQRGTLFGMEVWEYLLEKWGHRCVYCEAPDRKLTIDHVTPRSRGGSDRVSNLVPACEYCNQFKGNKPVQEFLKRHPDRLKRILEGLKQSLKDAAAVNSTRYKLIEVFEQLKLPIETDTGAMTKWNRRRLNVPKTHSLDALCVGDVRSVSDWIGKPTQVIACYGRGRYQRVILDRFGFPKANLTRIKRPYGFGTGDIAQVFSEAHVKRQFPFQISKMHRLTVKIDGFFQLARRKKIVKLSYRYLKMKQRNNGYFITLQRF

SEQ ID NO: 2271 - protein, 289 aa, Unknown
  0209697_10006283_-_->_pfam14239(21,196)[157.5]
MKISRDKQQVADKPEQKTAVVFVRNMWGKAINPTKPGKAYRLVRDGKAVPVCAKPYTIQMLGHCGGSVQPYRLGLDSGYSNVGASVINERTGVEVLSMEIELQKGQKDRNTDRKTRRHGRRNKKCRHRAARFDNRRRAKGKLAPSIQHKLDTHVRIATALINEKFVPISRAVVEGAQFDIQKIKNPNIEGVDYQQGDQAGFWNLREYVFHRDEHKCQNPDCKHKKEKNLPLQVHHLGFWKGDSTDRPGNLITLCVHCHRPQNHAKKGFLYGWEPKLKNFRPETFMSTIY

SEQ ID NO: 2272 - protein, 117 aa, Unknown
  0137371_10000193_-_->_IscB_CTerm_Trimmed_Muscle(18,110)[84.4]
MPCQPRKARLLLKGGKAKVVKMVRRNNRQLHKATIRKGGKRQRNTAPKYVHGFRLFDCVKHQGQTCFVFGRRSSGYFDLRTLDGAKVHASASYKKLAVVQKASALLVERRAAFPPVS

SEQ ID NO: 2273 - protein, 511 aa, Human gut metagenome
MYVVYVLDEEGKPLMPTKRFGKVRRMLRDKLAKVVSVKPFVIQLLYKPKTHITQPLHGGTDPGRKNIGMSVINDKGEILYSSTTESRNQEIPKLMAERKAHRQASRRGERLRRKRRAKKYKTTTTFPEGRKLLGYENGVLALKDIINTQARFNNRKRPENWITPTVRQCIQTHISLVRQICRFLPVTDWSIEHNKFAFMKMEDGTVKGTDYQNGRLKTYKNVNDYIWHLQNGKCAICDSKIEHYHHIVQRTKGGSNRPDNIIGLCESCHAKVHSGETSLKEIGEKKKYAHLSVLNQAIPFICSELEQLFGEDNLYTCSGYETYTYREMYKLDKTHDIDAACIAAIPHNIETPIQKVKTYKIKQYRNHNRQIIHCQKERTYKLGKEKIAKNRKRRTDQKELSFNEWYKIQKKNCSKTELAEIMKKLTVIKSIRAYNNMKRLKPGSVFIYAKPETKKAEKPEQKHKQAINHSGKYILRGAITNGKYYKAEDYNKNNFSAKNCRFQYFKSLLYI

SEQ ID NO: 2274 - protein, 565 aa, Unknown
  0079226_10027342_-_->_IscB_BH_Trimmed_Muscle(155,257)[71.7]
MHTGEQTDLGVLPQLQALEPASADTAGVASKRGAGDGGRARSTTGVQHGRGETGRKAGVAPSGAAREGNPTTGVAVVFVVDKHHKPLQPTTERRARKLLKAGRAVVHRRYPFVIRVKDRTVGGSCVDGVQVGIDPGSRHTGIAVFTEKATSKGVVRTGLWLGELDHRGQRISRNLSSRAALRRGRRSRNLRYRKPRFLNRHPAPCDSCGANAQSGKRLCRPCQNLPRAERERGARPARLAPSLRHRVDTLASWANRLQRWAPVTGWHQELVRFDLHAMQRPGITSVEYQQGTLAGFEVREYLLSKWNHKCAYCGASGVGPGSVPLNIDHIHPGSKGGSNRISNLALACVACNQAKSNMPVEDFLVGKPAVLARVLAQAKAPLADAAAVNTTRWAVFHMLADTGLPVTAASGGRTKYNRTVTGTPKAHALDALCVGVLDRVKSYPSTTMVIGCAGRGTYARTRSDKHGFQRLHLTRTKRHYGFQTGDLVTAAVPTGAKAGIHIGTVAVRARGMFNITTAAGTIRDIHHRHVRLIQRADGYTYHSTSTPRVRLLSTANDRVPAGQKK

SEQ ID NO: 2275 - protein, 388 aa, Unknown
  0315295_10106663_-_->_IscB_BH_Trimmed_Muscle(182,248)[71.0]
MATTTTRQKTHQSVLPQRAALESLSADTVGVTTKRGREAHVTGNRGVAAGSDHGRGETVRDDRRRVRRHGQPGHTGSSVTGGGDPTTTTTESTTEQVRFTAGKVFVLDRHGEPLMPCHPARARQLLDKGRARVARMYPFTIRVVDRTVADSEVDGVVVKLDPGSKATGISVARVDIDGGITGLVAVEVRHRGHQIHQKLVARAALRRGRRTRNCRHRAPRFLNRARPKGRLAPSLQHRVDNVTGWVDRFRRLAPVTGIAMELVRFDTQLLENPNISGVEYQQGTLAGFEVKEYLLEKWGRKCAYCDITGVALNVDHIHPRSRGGSHRISNLTLSCVPCNQDKDNQPVEQFVTDPARLARILAAAKRPLRDAAAVNTTRWALWRKLAAT

SEQ ID NO: 2276 - protein, 459 aa, Unknown
  0265297_10033497_-_->_pfam14239(2,190)[93.4]
MYFIVDGRNNLQHPTKKHDMIIRWISTGKAKFIGRDIVQVFKKFDRSKTIDCRFIIGLDPGYKNIGYSVFKIYKNQIQNILNGEVLTRTSEITKLISERRMYRRSRRSKHRENILRKFGRAKFKAPRWKNRKKKPWAPTHMHLFQSHLNLLQCIFNRIDYNQSEIVLEHFKFDSQKALDSTVSSWKYQKGPQFGFENVKAYVRARDNYKCQICGEKLLSLSVHHIQERADGGSDRPENLVTLCQSCHLLLHQTLAECPRPSKASPMRDSGVLNSCMNYLVNYISPAYTITGSDTAALRHYYNIEKSHVNDAKVIALSKLDLENFNCQDLSNTVNLKQFRRHTRNCVQRYEDRKYICDGFTVAWNRKSRSTQAESKPSLQEFKQEYPEEKVVAKPGRIIYFRTNSQAKFRPGDIFKHQNINYVLKQWASTQGTVTSETEIKFKIRNCRKIRNNSGLVTTR

SEQ ID NO: 2277 - protein, 327 aa, Unknown
  a0256842_1000027_-_->_pfam14239(2,168)[177.4]
MVFVLSKNKTPLAPTSEAKARILLKKGKAIVHKVYPFTIRLKENKECKKIFEIKFDVGASVTGVAIVDAVKCFFFAEIVHRGAVIKKAMDSRRAIRRSRRNRKTRYREPRFDNRTRPEGWLPPSVKSRADNVINFAKKYAKLIPIFSVAVEKDLSHLKPKKTPKQASIVQSARTYTIKELSRNFDVIVGEGWETYANRKELGLPKQHYYDAMCIGKEYKYEIVTDKVLEIKAQGRGSRQMCRMDRFGFPRTKAKSSKIVKGFQTGDIMKAIVSKGKKIGTYLGKVAVRASGNFNITTTKTTIQGINYKYCRTIQKGDGYAYAISTIK

SEQ ID NO: 2278 - protein, 426 aa, Unknown
  a0209123_1000186_-_->_pfam14239(4,178)[206.9]
MNGVFVISNSKQPLMPTSPARARKLLSGGKAAVFRSYPFTIILKDRAIGVIQPVRVKIDPGSKETGIALVNEVTMKVVFVMVLVHRGLAISTILASRRVLRSGRRNRNTRYRKPGLANTTKPEGWLAPSLLHRVHTTMTWVRRLSCLAPVAAISQELVKFDLQKLENPDISGIEYQQGTLAGYEVREYLLEKWHRTCSYCDAKDIPLQIEHVKAKTNGGTNRISNLTLACEPCNTAKGKLSIEVFLAGKPDRLKKIKGQLRQPLKDATAVNATRWRLFESLKLTGLPVETGSGGRTKFNRTIQGYGKAHWIDAACVGVSGASVIIPSGLHPLVAKASGHGNRQMCGTDKFGFPIRHRTAQKQFFGFQTGDMVTANVPKGKKIGIHTGRVLVRANGNFDIQTGTGRVAGIGHRHCTMVHQKDGYAYQ

SEQ ID NO: 2279 - protein, 649 aa, Unknown
  a0373956_0001933_-_->_pfam14239(3,165)[122.1]
MFVPVVDQNQQPMMPTTPARARRWIASGKATAFWRGGLFCVRLNQEPSSRVVQPVAVGIDPGSKREGYSVISAAHTYLNIQAKARVGVKEAEEQSTRMRRTRRNRKTPCRQPRPNRRQSKKTLPPSTRARWQWKLRVARFLCSLFPVSIIAVEDVAAATRPGKRRWNRSFSPLEVGKHWFYEEIRALAPLELVHSYETKAVREQLGLKKTSKKLAEVWEAHCVDAWCLAYRAVGGNTAPDHRGVVVFAPLIWHRRQLHRFQLEKGGMRKPYGGTLSQGIKRGTLVQHPRWGKALVGGTMDGRLSLHDPGTYKRLTQGAKVAECHVVTVLRWRTCLLPLHPLPKKRRASSPASKARVLGKSRLMSVTLLREGEREASMQKLAGASSLSFAHKRVWTSKTASRLFTVLAPVLLGMVLLGGWYFSTSRGLVATYELPPPSDVWTSLSVGFGSGLFLHMAWVTLQESLGGFLLAVMIALPVGFGLAKWRLFAATIYPYLAAGQAIPAIVIAPFLVVWMGYGMGPTVVLCLLVVLFPMIITTALGFQTLDQALVDAARVEGASLWPMLTRIELPLALPAIMAAVRTGLTLSVVGALVGEFVTNTDQGLGALVQIAKNQYDVPLMFATVLVLAIMAGVFYGITWGLTRISEILST

SEQ ID NO: 2280 - protein, 244 aa, Unknown
  316622_100118550_-_->_pfam14239(3,174)[185.2
MLVYVQDQEGKPLMPTRRCGAVRRWLKSGRARVVRREPFTIRLVDRAGGYTQHLQAGVDLGTAHVGVAVVSAQEEVFSGEFRLRTDVSGLLTERRQFRRARRSRKCRHRPPRFRNRRRRDELAPSVRAQVAETLRVVRLVEGLLPVAAWTFEIGNFDPHQLVHPDVRGVGYQQGEQYGFANAREYVLWRDRHTCQACRGQSGDPRLTVHHLRQRQERGSNRPANLITLCRTCHQRHHQGPPLPL

SEQ ID NO: 2281 - protein, 438 aa, Unknown
  0209048_10010134_-_->_pfam14239(4,179)[225.1]
MSQVFVLDANEQALNPIHPGRARLLLKQGKAAVHRRYPFTIILKRVVEQPTLHPLRVKIDPGSHTTGIALVNEHTGEVVWAAELTHRGEQIKRDLDKRRAVRRSRRQRKTRYRKPRFANRRKRTGTLPPSLESRVCNVLTWVRRLMQICPVTAISQELARFDTQALEHPDIEGVDYQRGQLAGYEVREYVLLKWNHQCAYCDAREVPLELDHVQPRSKRCLDRVSNLTLSCRSCNQRKGNRDVREFLHDDPARLARILAHLKSPLRDAAAVNTTRWALNARLKLFGVPVESGSGGLTKYNRVMRGLDKTHWLDAANVGRSTPASLIIKGIVPLHIIATGHGSRQMCRMDKYGFPRTGPKQRKRVQGFQTGDLVRAVVTSGTKQGTYVGKVAVRTRGVFNITTAQGVVTDIHHRYCTLIARADGYTYRRPKEVALSPIA

SEQ ID NO: 2282 - protein, 428 aa, Oscillatoria sp. PCC 10802
MKVFVLDTNRRPLDPTTPRRARKLLKGGKAAVFRLYPFTVILKRAVDSEPVQPLRLKIDPGSKTTGLAIVSERTGAVVWAAELTHRGFQIREALNSRKVKRRNRRYRKTRYRARRFNNRLRKAGWLPPSLNSRVENIVAWVRRLRRFAPISAISQELVRFDTQVIQNPEISGVEYQQGELQGCEVREYLLEKWGRKCAYCGAKETPLEVEHIYPRSKGGSNCVSNLTLACHPCNEKKGNRDVADFLSGKPDLLQRILSAAKAPLKDAAAVNSTRWALYEGLKNTGLPVEAGSGGLTKYNRKRLGLPKTHWLDAACVGESTPENLDASKIEKPLLIKATGRGCRQRVNPDKNGFLISHKSRAKTYQGWATGDIARADIPKGKYTGIHRGRIAIGQDGQFKIQVAHKKRFSVNYKYLTPIQKGDGYGYSF

SEQ ID NO: 2283 - protein, 236 aa, Unknown
  Ga0101763_1138_-_->_IscB_BH_Trimmed_Muscle(33,66)[28.8]
MGNGVDSHRATNKDCTRKSSSCSSQSAQSKNAIEKPRFKNRKRPEGWLPISLMHRVFGVKTWADRLTRLAPVGSVVQELVRFDTQKMQNPELSGVEYQQGELFRYEVREYLLEKWGRKCAYCSVSDVPTGTGAQTKFNRCRLNLPKEHWIDAACIGQVDTVKLATTQPLLIKSTGYGSHQVIQIDKYGFPRKGYQVKLPVKDWKTGDIVNVVADKNAGLRGVRLKTVRAKTLAASG

SEQ ID NO: 2284 - protein, 494 aa, Nitrospira sp.
VQTRHGWPRNGPASYAGLQHGRGEMCREAHVTAERREQRSNPIQSQVFVLNQEGQPLMPCHPARARQLLKKGRAVVHRAVPLVTRLKNRTKAIVQPVRLKVDPGSKATGMALVRHQPSDSITVLSLFELQHRGHQISESLTARRHMRRRRRGNLRYRAPRVLNRARSAGWLPPSLQHRIDTTLAWVKRLQRFAPIKNISCELVRFDMQAMQNPEIDGTAYQQGTLTGYEVREYLLETFGRQCVYCEAKDTPLQIEHIQPKALGGTNRISNLALACRSCNQKKAAQAIETFLADKPEIPRHIRKQAERPLKDAAAVNSTRWALTQALRSTGLPLELASGGRTKYNRERLNVPKTHALDAACIGEFRVLKGWRRSTLHLRCTGRGRYQRTRLSKDGFPVGYLMRHKRVNGFQTGDLVEAHVPSGKKAGTYQGRIAVRVSGSFNIRTDEEVIQGISYRYCKLIQRGDGYGYIVRPQMTSHKAQSMRPALNAALFHPQ

SEQ ID NO: 2285 - protein, 463 aa, Unknown
  a0209639_1000561_-_->_pfam14239(3,180)[219.8
MHVFVLDTNKKPLSPCHAAVARKLLRQGRAAIYRQYPFAIILREIKQCAEPTKLRIKIDPGSKTTGLVVLWERNNTGIVIWAVELKHRGHAIKKLLDKRRANRRSRRNRKTRYRACRFLNRARAGGWLPPSLQSRVQNTLTWVNRLCRLAPISSCSMELIKFDTQLIQSPEISGVEYQQGELQGYEVREYLLEKFGRKCVYCGETDVPLQVEHVIPKHPAVGPIGTNRVSNLTLACEVCNKAKGNSQPNDWLEKLQQSTIAKDKIRAGNLPKVLKQLKQPLKDAAAINSTRWALYRVLEQLGLPLEVGSGGLTKFNRTQRNLPKTHWLDAACVGKSTPEQIVFSDGPILAISATGHGKRQRCVTDKYGFPIKHAPRAKSFMGFQTGDIVNAVIPKGKYKGMHTGRVAIRFRPSFKLNGFDVHTKYLRIIHRADGYAYEFALGVQVSSPQMNLGAPTWRLIGGD

SEQ ID NO: 2286 - protein, 419 aa, Unknown
  a0209347_1003246_-_->_pfam14239(3,182)[202.7]
MLVYVINKHGKPLMPCKPKKAKRLLQEGRAKVVRRTPFTVQLLYGSSGYRQRVRVGVDTGAKYVGVAAVRTDEKGRAKNTLLQGECHLRADIRGKMDRRRAYRRARRGRKTRYRKPRFDNRRRWEGWLAPSIQSRVDGTLKVMELLRQLLPVASVEVETAQFDTAAMARGVLRLRPWQYQRGEQYQFENVKSYVRHRDGYQCRQCKAKGRPLAVHHLRQRADGGTNRPANLITLCEECHDRVHTGGIKLTAVPGRTNLRYAAHTQAGKTALMTALREQLPTSETTGAVTKVDRLEMGLSKTHANDALAIAATGVPVEPVDTQFFMRCVPKGNYRLFKGARSHIRNQSARELFGFRRLDKVCLPGGQEGFVKGKRSSGYFNVSTLDGTVISASISYKRLRLLEKQTSLLVERRQAVSSPD

SEQ ID NO: 2287 - protein, 492 aa, Streptomyces sp. SID12501
MALEFESADNPGIRDETGLGRRKASGVEHVRGEITGSAPTAGGVTPDHQVREPGREADPAVFVLDKHGTPLQPTSPARARKLLVSGRAVVARHTPFVIRLKDRTADASEVDGVELGIDPGSKHTGLAVFTARDGERRGRFAVQLDHRGAAIRKKLEQRSAYRRGRRTRNLRYRAPRFLNRTRPKGWLPPSLQHRVDTTMSWTGRLARWAPVRTVHVERVAFDTHAISAGKPLEGAEYQHGTLHGTEVREYLLAKFGRACSYCGATGVPLNIDHIRPRSRGGSDRVSNLTLACIPCNQAKGHRPVEEFAPKQAADILKRAKAPLRDAAAVNATRWALWRALDARLPTRTASGGRTKWNRVRCALPKTHTLDALAVGDLDTVTAWPRTVLVVKATGRGTYARTRADKHGFPRLRLPRTKQFFGYATGDLVRAVVPSGKNAGTHTGRIAVRSSGSFAVRTAGGLYTARYKYFRLLQRADGYAYTTQPEGGPSDAP

SEQ ID NO: 2288 - protein, 297 aa, Lachnospiraceae bacterium UBA2891
MMPTNAYRARKLLKSGRAGIECYKPVFTIRLTDREEGAVQPVEYTCDTGYQHVGISIKSEKHEFVHNQYDMLKDETERHNDCRKYRRVRRNRKRYRKPRFDSRSKKNKDMAPSLRHRMENQIRLFESFCRVLPITTATFEMGKFDTQLLQAIAEEKPLPKGRDYQHGSKYLYQTERMAVFGRDHYTCQICGRSVRDGAILHTHHIGFWMSPPYRSGRISNLLTVCEKCHTAWNHKPGGRLWGIKPKLTNLTAATYMSTVRWAMYRRLVKTHPDVDIHIQYGAKTGITRQERHIAKTH

SEQ ID NO: 2289 - protein, 333 aa, Metagenome
MVPVLDKNRIPLMPCSEKRAKKLMDRGDARPFWCKGVFCIILQREPKSRHMQDIAVAIDPGSKFNGYTVKSEAHTLLNVQAHAITDVKKKMEERAMLRRGRRGRKTPYRKCRFNRSVKERLAPSTKARWQQHLNIVKWFGKMYNIKHIVVEDIAAKTLKGAKKWNKTFSPLQVGKKWFYDTVESLGYLLHKFKGYQTALIRNSLGLKKNSKKDKKCFYGHCVDTFCLATQVIGGSGVPDNLFVKFIKPLRCYRRKLHEILPKKNGLRRNYGSTLSLGINRGTLVEHIKYGICLIGGTSKGRLSLHDLATNKRLCQNAKKEDIKILTQMRWNIY

SEQ ID NO: 2290 - protein, 511 aa, Unknown
  a0257069_1000440_-_->_pfam14239(12,221)[152.1]
MKHKQKERVNIVYVVDKNGRPLMPTKHFGKVKHMLRDGRATIYLHRPFTIRLCYETPGKTQSVVIGVDPGRTNIGLVSVSQKGEVLYAAKVETRNKDVSKLIAERAVHRRASRIGERQRRKRRARKHGTTTKFPNGRKLPGYKDGVLELKDIINQEARFNNRKRAAKWLAPTARHLLQTHQNLLLHVRRFLPITAVAIEHNKFAFMLLEDGTVRGADFQNGRLKGYESVAVYVRARQNDKCEICGAPIEHIHHIQARSENGSNLPENLVGLCSKCHEAVHVGKKEINIKGFAKKYASTSVLNQALPHFLFWLETAFGDGNVRTCAGWETKVERKRLGFSKDHHYDAVSIISACGHPVDLNLGGGRILVHTPHLIMQFRHHDRQIIHCQFERTYKVVGDNGKLISVVKNRKPRFEQPKSMPALNVWYDDEVKRSGQHKARLALSQLVVVKSNRRYKNPARVMPGTVFRYEDDLYVMQGSVSYGQYFCAIGQGKRMFSSKKCEVLCRRGLIYL

SEQ ID NO: 2291 - protein, 420 aa, Human gut metagenome
MVYVISKRGKPLMPCTNVIARLLLKQDKAKVKRRCPFMIQLTYDATQYIQDCTLGVDTGSAHIGAAVVDADKRVLYMSETKIRNDITQKMDRRRAYRKVRRYRKTRYRKTRWMNRKNSKRENRFSPTMVSKLHSHQKEIEFVKSILPITRLVIETGTFDCHLMKNPMLYNQKYRHWGYQQGPDYGFANTKAKVLNRDSYTCQCCRGKRKDSKLEVHHIVYRSKGGSNEEDNLITLCHTCHSALHHGMMKLKVNGKQKGNLRYATQMNSIRTQLLKLYPEAIETFGYVTKENLQLSGLPKTHCNDAVMIASGGNTVNFKTHSLCRKKCIPKGDYQQTKGIRSEQPLITKKIYGFRKFDKVQYLGKEYFIKGRMSTGYTVLMDIDGNKVDFSYMPKGYKTPKLKNCKRITARNGWMIQEIAI

SEQ ID NO: 2292 - protein, 434 aa, Unknown
  Ga0310136_005540_-_->_IscB_BH_Trimmed_Muscle(85,158)[95.2]
MTLARPTLPPKGEIAEMYVFVVDAERKPLAPCHPAVARKLLKQGRAAVLRKYPFTIVLKETKETHPQDIRLKIDSGSKATGMIILHKNKVIWAAELEHRGHKIRERLLERRQLRRSRRYRKERYRKPRFDNRRRPEGWLPPSLESRVANIITWANRLIKLCSISAISLELVKFDTQKLQNPEITGIEYQRGELYGYEVREYLLEKWGRKCAYCGRNDVPLELEHIVPKSRGGTDRVSNLTLACHDCNQKKGNLTAEEFGYSEVQKKAKVPLKDVAAVNATRWALYGRLKETGLPVECGTGGMTKYNRSKLGLPKEHWTDAACVGASTPENLRVSINSVLQVKAVGHGRRQRCITDKYGFPKAYANRQKTYQGFATGDIVRAVIPKGKYAGSHIGRIVIRHRPSFGLNGFDVHPKYLTILQRGDGYDYSLLAIER

SEQ ID NO: 2293 - protein, 451 aa, Human gut metagenome
MFVAVISKTGVRLMPTSEYRARKLLNSGKAIIYGYRPFTIQLTERETGALQPVELCVDTGYIHIGVSVKSEKHEYLELQVDTLTNEKKKHDERRMYRKQRRNRKRYRKPRFDNRKRESGWLAPSLRHKKEVHLQVITKICDVYPIADITLEMGNFDTQVLKAQEKGKPIPQGTDYQHGERYGIATLREAVFTRDEYKCQCCDRGIKDGAILHAHHIQYRSHGGTNRMSNLITVCEKCHTPANHKPGGKLYGWKPKAASFKGATYMTIVRWQLYNKVKEALPVIGVKITYGAETKERRRSMDVKKSHVNDAFVIGRFHPKHRSSPVLYKKKRRNNRCLENFYDAKYIDSRNGKKRSGQELFSGRISRNHKKDSENLHRYRKKKVSRGKRTIRIQRYKIQPHDIVLFDGKKYETTGCHNKGTRAILLPEKKSKSVDKLTIYKYAGGYYPSKFA

SEQ ID NO: 2294 - protein, 516 aa, Unknown
  a0187878_1000231_-_->_pfam14239(86,272)[124.3]
MNTRDRRLTPTNASLIAGWDEAVHREGTELKADTASAFYLDGEGTSKNSKESKDIARLIPNKDLKILENSRINKKIKISKKNNYRVPVLYPDGKPGMPTSNKRANKWLKEGKAEKVRNKLNVFAIKLKFWPIYRNLQQIVLLIDPGSTFTGIAVMSKKCILISYMLELPGYKKGSKPFTVINRHRKKIEKYHNTIVDRITDRRRLRRSRRHRNCRRRDERWLNRTKKGKIAPSMLAKKQLELEAVNELSKLYPITIIGFEDVAFNHWGDKDGTKGQYFSQVEIGKNLLLDRLKKIALIQIIKGYETARRREQLKLPKEGDKTKRSIKSHVTDCIAMGSIILNTNQSSSNKFHFNVISRPKYSRRVLFAEQPNKDGITERAGGHIPHTPIFKGLRKGDYVEANAPNLKKIYRGWISGYTDDRIYISDFDWNQSPSFSVDNIRLLDRNHGLINLRLGWIKDTIDICQFGSKQIDAENKIINMKVINNIIEMKKKAEKDAIKESNKQDKTIQRGIDDAW

SEQ ID NO: 2295 - protein, 381 aa, Unknown
  a0268280_1010517_-_->_pfam14239(63,233)[209.7]
MQKLQAKLKNIPTDTSLVCSSINSVLNKDQSLSVQNKVLTCNNSEENLQKHKSGSDLRVLNIVYVLNKRGLALMPSCQSKARRLLRLGKAQVVKMYPFTIQLANASGEAKQEIVLGVDVGYKHVGISAISQNKELYSAEVVLRTNISELLSERKMYRRNRRNKLWYRKPRFNNREKGKGWLSPSVQHKIDSHIRIIDNIKKLLPITKIIIETAKFDIQKINNPEICNIEYQNGVQKDFWNVREYVLYRDNHTCQNCKKNNKVLNVHHLETRKTGGNRPDNLITLCVECHKKYHLGKIKLDIKIKNNFSSETCMSIIRNRLIDKLRLKYNIEETYGYITKSKRMENKIEKSHINDAFIISGGINQFRVSSYLVTQKRKNNRG

SEQ ID NO: 2296 - protein, 419 aa, Unknown
  0326511_10041793_-_->_pfam14239(2,174)[194.4]
MVYVQDINGKALMPTERHGKVRKLLRDGMAVVVMREPFTIRLTYESTSFIQEVSLGIDAGSRHIGVSATTADRELFSAQVELRTNIQKLLANRMELRRTRRSRKTRYRKPMFDNRRHDNGWLFPSTRQKVDTHLRVIRMVMDILPISKTTIEVAKFDVQKIKNDAIAGIEYQQGEQFGFYNVREYVLTRDGYQCQHCKGKSKDPVLNVHHIESRKIGGNAPNNLVTLCKTCHKKYHKGEITLRFMRGVSFRDAAAMNAMRWCVYNSAKDEFRNVHLTYGYITKHTRIRNGIKKSHTADARCISGHPLAVAQTDVYIFKQRRRHNRQIHKCAILSGGYRKLNQAPYLVKGYRLFDKVSFNGQEAFITGRRQSGSFAIKTIDWKSLSEGVSAKKLSFLNISRGFLISNKKSLTNYNKSTNE

SEQ ID NO: 2297 - protein, 145 aa, Unknown
  a0334886_1000752_-_->_pfam14239(3,84)[88.9]
MLVYVLNRHGKPLMPCKPQKARRLLKEQKAKVVKRTPFTIQLLYGSSGYKQDVILGVDAGSKTIGVSASTENKEVFDEVEYQGEPCFIFGRRNSGYFDIRKLDGTKVHASASYKKLKLLSKTTSLLCERRQAVSSPQLKQGVSAD

SEQ ID NO: 2298 - protein, 442 aa, Proteobacteria bacterium
MSHVFVLDRARTPLDPCHPARARELLQHGRAAVFRRFPFTIILRDRKRAESVVHDHRLKIDPGSKTSGLALVQDQRVVWAAELTHRGQRIRDALESRRGLRRSRRQRQTRYRQPRFLNRTRPSGWLPPSLGSRIAHTMTWVERLARSCPITALSQELVRFDTQMMQDPEMAGVAYQQGELAGYEVREYLLEKWKRTCAYCHKTGVPLQVEHLIPKARGGSDRVSNLTLACGPCNQQKGTQTAAEFGFPAIQAQAKQPLKDAAAGNATRWGLYRALATTGLPVETGTGGRTKYNRTRLNIPKSHWGDAACVGASTPEALRVAGIQPLGIRAMGHGTRQMCRTEAHGFPKAHRTRQKKYGGMQTGDLVQAVVPKGKYAGTWVSRVVVRASGWFDLVIHGKKASVHHKHCTRLWAADGYTYTLPAGAGTAVSSPHSSEGSPQRNL

SEQ ID NO: 2299 - protein, 414 aa, Human gut metagenome
MPCSPAKARLLLKEKKAIVKRRTPFTIQLTIATGETKQPVGLGVDAGYKHVGLSASTDKAELYASQVELRQDITDLLSARRALRRARRNRKTRYRAPRFNNRIRTKRKGWLAPSVENRINAHLSRIETVLRMLPVTKITVETASFDMQLLKDPDISGKEYQEGEQLGFWNVRECVLFRDGHVCQHCHGRLKDPVLNVHHLKSRRTGGDSPGNLITLCETCHKALHRGELTLKAKRGQSFRAEAFMGIMRWEVLNRLKASHPELEVNNTYGYRTKHARISNDIAKSHCADAFCVAGNLGAKRLCEFFFQKQTRWNNRQIHKLSVLKHGLRKRNQVPFEVNGFRLFDKVACKGEEGFIFGRRSSGYFDVRKLDGTRISAGISYKKLHLLEKRQTYITEIRKEKALPPLPEGRGLRA

SEQ ID NO: 2300 - protein, 337 aa, Unknown
  0172375_10009941_-_->_IscB_BH_Trimmed_Muscle(68,138)[50.4]
MFIPVVSKKGKPLMPTTPYRARKLIKAGKAIKKFKKGLFYILLTERMIGKTQDIAVGIDPGIKKEAFTIKSNSHTYLNIQIDAINWVKDNVKTRSLLRRSRRQRKTPYRKCRLNRKKSKNLQPSIKARWQWKLRIINFLVSIFPITYFIVEDIKAKSKKNCKKWNMSFSPLEDGKNYFYTELRKQGNVELKMGYDTAELRNNLKLEKSYNKNSNKFEAHCIDSFVLANWFVGGHLTPDNKNILLIKPIELHRRQLHRLQPSKKGIRRRYGSTNSLGFKRGSLVKHVKYGLCYVGGYLKNNISLHNIENGKRITQKAELKDCICLNFNAWKISYLFNK

SEQ ID NO: 2301 - protein, 423 aa, Human gut metagenome
MKQDQKYAFVQDNRGVVLSPTKIEKAWYLIRHNKATLVKTEPMVIRLNRKQNNTDMSFMKVGLDPGDTTGVAIVQESHLNMSKNKAVFKANIQHRNDIKSLVESRREYRRLHRYNKRYRQARFNNRASSRRKGKVAPSIKNKKDEILRVLRYLSKYVCIDGIYIEDVSFDIRALTDEYKPYRWQYQKSNRLDENIRKAVIQRDKCKCKMCGAKDTQLEVHHITPKREGGNNTLKNLITLCSECHKSVTGVEDDYKSYLYSLIDGKQIPLAPAMHVMIGKNYLYQQLRQFIGGDSYVYLTTGGDTANSRLDWNIEKSHSNDAACITDVRCLPENLKTYVYTIKPQRKKKKTKQNTSNLAIRHRDLVWYTPRGREPIKCYVTAIMQTGCCVGKYKLKSIDGERFGPIAESSLRKIQQGTSSLMFV

SEQ ID NO: 2302 - protein, 456 aa, Unknown
  0114919_10025663_-_->_IscB_BH_Trimmed_Muscle(122,196)[71.0]
MQKLSEKLKNTPRNASLVPCSVNSQLNKEETLSVESIVLTDNNPEVNLSQHAERLKVKVYVISKEGNPIMPCSCAKAKHLLKEGKAKVIKRSPFAIQLNFECENQVQDVTLGIDTGFEFIGFSAVSEREELIAGTLKLDGKTKERLNDKRMYRRIKRNKLWYRKPRFNNRKKVKDWLPPSIERRYQTHLTLIEKIKKMLPITQVIVEVAKFDIQKLENSEIQGEEYQQGTLYGYQNTVSYLKTVQKNICPFCKRKLESGESKATHHRFMRSDSRRTDRIEGLILFHKKCHVRLHEQKREKEFQNIKIGKYQPSIFMSIINKRFWKDIPDLKVTYGNVTFVDRNNLGLAKSHTNDAFVIAKGNSQTRVKSFEIIQKHRNNRILQRQRRGYKPSIRRSRSIIQPLDLIWIKGIKYISKGMNGYGRYVYVDIGENKTSLNMKLVEKYFSQGSLSFSLKN

SEQ ID NO: 2303 - protein, 445 aa, Unknown
  Ga0376445_000045_-_->_pfam14239(4,180)[222.6]
MHRVFVLSSTAEPLMPCHPARARALLSAGKAKVYRRVPFTVILMERAEGETQPLTEQLDPGSKTTGIALVALFQRGRCVVWAGEMSHRGQAIKSGLDSRRALRRGRRHRKTRYRAPRFDNRRRPPGWLPPSIQSRVDNCAAWDAKLRRLAPVTAIAVETVRFDTQLLEHPDIAGVEYQQGTLLGCELREYLLARHHHTCAYCLGQSKDPILEREHVVPRCRGGSDRVANAVLACRTCNVAKANLLPGTWIEQLRRSKKPIDATRARQMEKILTGWRPSLRDAAAMNATRYAIGRTLKAAGLPVSFSSGGRTRFNRTAQGYPKAHWIDAACVGEEGSTVRLDPAAKPLQIQAVGRGSRQMTRPDRYGFPRTGAKRVKRVLGLQTGDWVRLCQSSGKYAGTYVGRVAVRERGDFDIQVVRDGQKIKITAPAARFTLLQRGDGYAYTT

SEQ ID NO: 2304 - protein, 359 aa, Unknown
  a0255344_1006041_-_->_pfam14239(3,175)[123.3]
MLVPVVDQVGTPLQPTHPAKARRWLKEGRCSKHFHRGTFYIRLKKIVTEPHINIILGIDPGSKRTAFTVATRNRVVLNWMIDSTNFTKNNIEKRRMYRRQRRYRNTPYRECRWNRSSLRNDGRVPPSTLSRWKRHLRLIYSLLKILPITKVIIEDVAAVTHNSKKKRLVDSKYVSCWNAAFSPLQAGKNLFYNFLEDRGIAVYKKKGWQTAKHRKKHGYKKISDKLSTKWEYQCIDSHSLCEMYYNRKIRPVRNLNFIQFLTFSRRELFRMFGKIRRRHGSTRTLGHNRGTLVYCKYVKRGRLEPIGLCYLAGYMKVKEEYRVCLYSLQGKELGQSFKLSDCVMLTNLRYLNNYIRNER

SEQ ID NO: 2305 - protein, 437 aa, Bacillus sp. REN51N
MVFVLNQEGKPLMPTKRHRKVRLWLKNGQAKVVKRKPFTIQLLFKTEDYVQPISLGVDSGFYHIGISAVTEKEEVFSSEVSLLKGMVERNEERASYRRTRRARLRYRKPRFDNRKKDKGWLAPSIQHKLDSHLRYIEWVKSILPISNTIIEVANFDTQKILNPDIQGLEYQEGVQKEFYNLREYILHRDHHTCQNPNCKNKSKEKVLVLHHIIFRSNGGSDSPNNLITLCDKCHTPRNHKGFLRDWRPKVKRLRSATFMSMVRWKLVNALECNHTYGYLTKSKRIEFEIEKTHANDAFVIAGGTSKHVRAQVHQVEQVRRNNRSLDKFYDAKYIDARTGEKAAGQDLFNGRTKRNKNTNGENLRKYRQEKVSKGRRAIRTMRYPFQPRDLVRSEGYTAFVVGTQNKGAYVKLKDRKKVAKTATLTLIKSGKGFCFLD

SEQ ID NO: 2306 - protein, 442 aa, Unknown
  556_-_->_IscB_BH_Trimmed_Muscle(81,155)[75.6]
MGEGLQPDASPRRQNLRVFVLNKRGQPLMPCSPAKARLLLKEKKAVVMRRTPFTIQLTQATGETVQPVKLGVDAGSKFIGLSASTDKAEFYASEVELRTDVVDLLSSRRELRRARRNRKTRYRAPRFNNRVHSKNKGWLAPSVENKINAHLSRVDAVRQLLPVTKIVVETASFDIQKIKNPDIEGADYQWGEQLGFWNVREYVLFRDGHRCCHCHGKSKAPILNVHHLESRKTGGDAPNNLITLCETCHKAYHAGKIVLKAKRGQAFRDAAFMGIMRWTFFNRLKAQCPELDVRNTYGYLTKNTRIRHGLDKSHHTDAFCIAGNLGAKRLGEYFFQKQTRKHNRQIHKMSILKGGVRKRQQAPYEVKGFRLFDKVRYGSREAFIFGRRNSGYFDIRLLKGEKVSPAISYKYLQLLESRKTFLTQLIKKDAIPPATEVAGFLA

SEQ ID NO: 2307 - protein, 285 aa, Unknown
  0079226_10038291_-_->_pfam14239(32,213)[210.1]
MATSGGRVTTKPTGEVAGGVVPAPVRAPQPRVFVLDKNKRPLQPMRPDRARKLLDAGRARVHRRAPFVIRRVDVDARTEEVIVDGVEVGIDPGSKATGIAAFITTPEGARQGVWLGELVHRGLQIKQRMQARAQLRRGRRSRNSRHRAPRFDNRTRPAGWRPPSLAHRVDTTLSWVNRLRRWAPVMAIHIERVRFDTHAMASPEVSGIEYQQGTLAGYEVREYLLAKFDRACVYCGASGVPLNIDHVHPRSKGGSDRVSNLVLACIGCNQAKGNMAVAEFVTDPA

SEQ ID NO: 2308 - protein, 467 aa, Unknown
  0194044_10012301_-_->_pfam14239(1,111)[34.7]
MITLAIDYGASNVGIALVRNTEAGNEPLFAGTVILDARKLKEKVETRAGIRGLRRTRKTKNRRLRELGEALSGLGMEGDKVARIVRFSNRRGYKSLFSDPNETEKVDEAESAYRCTREQFFHQLEQELQEILSDREACDKALSVCERILNRKGDRYAEIRLIRIDNRGASRCAWGDCNKVTPRRDNATDDAIAQQLVTYFQSAIKTEPHKLEMLNQTVCELDSISKNLRGAIANNDDSSKKILRRRARKSLRNLRAELPSTEPEDVSGDAWKYVEKGILNTLENSGGRNRYCREHSKSYVEKVLEGKPPEFKSTIADSDIISRREQIAFSKLWRYIEARLLPLAPKGIDRIVVERTAFDLLAGKRKKIRDASSEGVENIYQYGPMYGFPNEKEMLRKEFGGLCAYCGNPSDTLMDRDHILPRRDFFFDSYLNTLPACPTCNSEKSASLPSQVSLRISEDAYSMYKQY

SEQ ID NO: 2309 - protein, 469 aa, Unknown
  a0256831_1000378_-_->_IscB_BH_Trimmed_Muscle(72,147)[76.9]
MSNRVFVLDTNRKPLAPCHPARARELLRKGKAKVFRKYPFTIILNKAYPNAKLTYITIKVDPGSKQTGMALIAKGQNKTRCIFGLNIVHRGQQIVDALLSRRQSRRTRRSRKTRYRKPRFDNRAIPKGWLPPSILSRLSNIKTWILRFSKLTTIANAVVELVKFDMQRIRNPDIKGKEYQNGLLKDLELKEYLLYAYNHTCQYCHGVSNDSILEKEHIHPKSKGGSDSVDNLTIACRTCNIAKSNLLLNDWLRIVSDKKDKLSVARTKYIPKVIKGIKPSLKDATVSNILSNRTIAFCESMGLNTEAAPSYLTKYNRKNHGYRKDHWIDATMCGNLDRKIEIYKSMRCITAIAQKTNNRQMCLMDKYGFPRTKAKGQSTVYGFKTGDIVRAVVPSGKYKGKHIGKVMVRNSGWFDVKTIKGKIITNYSYCKTTHKKESFTYQHGTKTILKIISNRRDCIKDIFNTVKSQ

SEQ ID NO: 2310 - protein, 421 aa, Unknown
  0310914_10061055_-_->_pfam14239(70,230)[108.5]
MQRKVKSDTRLDKIQDCEVLGRLKSTEHSGSGIPKDMPDASQVGLPSGRQRRWDCRHLHSKGLPPNAVIVPVLALDGEPLMPTCASRARRWVKQHKATPFWLNGVWCVRLRFEPSDRNKHEVVVGIDPGSKREAYTVASKEHTYLNVLSDAIDWVKDAVGSRKILRRARRNRKTPYRTNKQNRARGGIPPSTKARWQLKLRVVNQLRKMFPITGYVVEDVKATTHGRGRRWNSSFSPLEVGKSWMYGELLKLGTLTLKAGHETAELRKTFGVVKCCGDKMSMRFDIHNVDSWVLAKDALGAAKGRPENMQLVHARPLRFRRRALHLQNPTKGGVRRSHGGTLSQGFKRGSLVKHPKHGLTSVGGTKDDRISLHKVSGKRLCQNAKAQDITLLRRSSIAFRPIPKNGIPLPPKGDSFLPKIL

SEQ ID NO: 2311 - protein, 461 aa, Unknown
  a0256871_1000783_-_->_pfam14239(6,179)[129.0]
MTTRIIYVLNANGEPLMPTHRLGKVRRWINRGEAHWYGNSRTTIQFNHPVGNITQNCIEGVDLGNHLGISVVCTTTNQELYSGISQRDYQGEVKRNVKRREYRRTRRNRLRHRKVRFNNRRKSDGWLAPSIQHYIDFTVDEILRIQKFLPISKVILETSVFDVAKLTNFGVRPEDYTKGRLHGYHSLKEYLYDQQNGIDPIDGRHYPLSEMVVHHLQYRSQGGTNSPDNTILLARKNHNTANHNNGVLADLAKHYQSSLVNTKGAFLMNVMHLRLPKRLNNKPLQLTFGYKTAQQRQLYGFEKDRNDLANHAIDALLIANGNSHTKSMTNIIHREKHHRNNRSLEKFYDAKYYSNVDGKVYAGKELGSGRTNRKQPRTYNSRRCERGCKKSKGRRSIRRQHYQFQPHDKILWQGKPVEDCLGTMSNGKSVLFKWNNKRKSSAPKKLQLLHHSNNLIETIIQ

SEQ ID NO: 2312 - protein, 461 aa, Unknown
  0223826_10007721_-_->_IscB_BH_Trimmed_Muscle(71,138)[55.0]
MLTYVLAKDGTPLMPTYKINKVRRMLKEGKAEIAGHKPGFTIRLLYESGKGAQPVEVCEDTGYGTIGVSVKSEKHEFTHEEYTLLPDEKIRHDDCRKYRRTRRNRIRHRAAKFDNRKKDKGWIAPSLDNKVQRHVDIVTMYKKVLPVTDVTLEVGTFDTQVLEAVEAGRPLPKGIGYQYGPQYGFDTLREAVFYRDGYKCICCGKSAIKDHAILKIHHLGFLKGDHSDRMGNLATVCSKCHTPSNHKPGGKLYNLKPKLKPLGGAAFMNAVRWKIYNMVKERNPGLYVHMTYGAVTKRERLRRHIGKTHANDAYCIGFFHPKHKTRAVAYKKVKRNDRILQKFYDAVYIDRRDGKKKKGAELSCNRTNRSVPRNNSRNERPFRKEKASKGHVTTRKGRTQLKPGSLVLYKGKVMTVHGTHTNKGKVNVEFTQKASDDRKSANLSKVTIIRPMYQSGWVRIS

SEQ ID NO: 2313 - protein, 491 aa, Unknown
  0209656_10018899_-_->_pfam14239(1,168)[202.2]
MLPQSQALRVAAADKPWSARNGQQQTATVQPVRGEIKPAPQNAERGVTRTFVLSKEGNPLMPCSNARARILIRKGRAKVYRLFPFTIQLIDKASGDVQPVAIKLDPGANTTGVALVREHADPTKQTVLHLAEIAHRSRAIRKHMIQRAMFRRRRRTANLRYRAPRFDNRTRREDWLPPSLQSRVDNVASWLNRYRKLAPITSIYVESVRFDMQALENPDIEGLEYQRGTLFGSELWEYLLEKWGRRCAYCDAEGLPLEAEHIAPKACGGSNRVSNLTLACHKCNQRKGSQPVHLFLANDPSRLARILSHTKKPLSSAAAVNVTRKATTRVMSATGLEVHCSSGGRTKFNRTQLGIPKTHALDAACVGELSELESSNIPVLCIKATGRGSYQRTRLDSFGFPRGYLTRQKAVKGFQTGDLVKATMPRGKFKGVHQGRLAVRVRGAFVIQSSAGNVETSWKHCKRLMRNDGYTYEINSPAIPPPPKGGGSLAY

SEQ ID NO: 2314 - protein, 430 aa, Candidate division MSBL1 archaeon SCGC-AAA382M17
MSQKVYVRIMRGEPLMPTNPAKARHLLDDDRAEVVKRKPFTIRLKYPTGENGQEVTLGVDAGYSTVGFSAVTEDEELIRGELDLRDDVSDRLRRRADYRRNRRSRKTRYREPRFDNRGKEDGWLAPSIKYKMSDHLQLVEMIGELLPVTRTVVEVATFDTEKLADPELDVTEYVPETFRGYEVKEYLLAKWGRRCVYCGAEDVPLEVDHIVPKSRGGSDRVDNLTISCVDCNREKGDRTAEEYGHPEVQRKAGESLKEAAFVNIVRWKIVNELDCDHTYGYRTKKGRIDLGLEKSDDNDAFVIAGGGDQERTGPYRVTRGRRNNRKLEINRRGHGRSVRRERYEFQPGDLVRGDDALYRVRGSCSYGRYVRAFDEERNEEYLRADSLKLVKYGKGLCWREKTSRNSSPTESEDSKGVSSRQPDGMAERLW

SEQ ID NO: 2315 - protein, 419 aa, Unknown
  a0315550_1018591_-_->_IscB_BH_Trimmed_Muscle(73,148)[92.2]
MQRVFVLSSDREPLDPCHPARARKLLKQGRAAVLRKWPFTIILKDRTVAESVTHPHRVKIDPGSNTTGLGVVQEQTGEVVWAAELEHRGQQIKHRMTSRRQLRRARRGRKCRYRKPRFDNRASSRRKGRLPPSLQSRVENVSTWVERLRRYCPVEALSLELAKFDTQRMENPEISGVEYQQGELAGYEVREYLLEKWGRKCAYCGAENVPLQIEHIVPKARGGSDRVSNLAISCGPCNQEKGSCTAEEFGHPEVQAQARKPLKDAAVLNATRWVLFRRLQAIGLPLEIGTGGRTKYNRTQLGLPKAHWTDAVCVGELGEQVRVPPGLVPLQIRATGHGRRQRCGTDKYGFPIRHAPGAKKFRGWQTGDIAKAVIPKGKYAGVHVGRVAIRHRLSFRLNGIDVHPKYLELVQRADGYAYS

SEQ ID NO: 2316 - protein, 478 aa, Ferroplasma sp. Type II
MEKHMKEKQKLDRRDTYTPTDAPQVRGNCDHALNREETLSVHGLKTPSNNPHVDLLSPVGGHKADMPVFILNDDGKPLIPCKPAKARHLLSDKKAKVISSNPFTIQLLWHCEGNVETITLGIDSGYKHIGFSAVTDNKELISGEVVIRTDIPKLNEEKAMYRRKKRNKLWYRKPRFMNRGNNKEGRFAPSIEHKLETHIRLIEKLKRILPVSNTVIEVASFDTQKMKNPEISGIEYQQGELQGYEIREYLLEKFHRTCVYCGKTGVPLEIEHLTPRSRDGPDTVNNLAISCHDCNQKKNNLTAEEFGYPEVRKRALITMRDAAFMNTVRWKLTQLTGSEHTLGFITKKNRISLGLDKTHANDAFVIAGGTVQIRTLPFTITQRRRNNRSIQTNRKGFRPSIIRKRYAFQPGDMVLHDHERFSVVGMHNYGKSIVIKGGGKKMDINTKKVKLVKYGKGLQFAPQFLPTLSDGVSLGGVR

SEQ ID NO: 2317 - protein, 604 aa, Mastigocladus laminosus UU774
  MISC_FEATURE (317)..(556): Xaa represents any naturally occurring amino acid
MLRVPVLTPSGKPLMPTKASRARRWLKEGKARVVYNDVGIFQIQLVRCPRTQDIQPIAVGIDPGKLYTGIGVQSAKFTLWLAHLQLPFKTVRERMEQRAMMRRGRRGRRINRKLPYNQRAHRQKRFDNRRQCKIPPSIRANRELELRVLDELSLIYPITTVAYEIVKASGDKGFSPVIVGQKWQLENLATYAEVKQVEGWQTANIRQQLGLHKQKHSKGDAIPATHAVDGVAASCSAFVRYGIIDRHSRGWKGDVTVTPAPFTVIRRPPVSRRQLHLMLPSIGGVRRKYGGTVTRHDFRKGDLVKVPSGEIGYCSGXXXXXXXXXXXXXXXXXXXXXXXXXXXXXXXXXXXXXXXXXXXXXXXXXXXXXXXXXXXXXXXXXXXXXXXXXXXXXXXXXXXXXXXXXXXXXXXXXXXXXXXXXXXXXXXXXXXXXXXXXXXXXXXXXXXXXXXXXXXXXXXXXXXXXXXXXXXXXXXXXXXXXXXXXXXXXXXXXXXXXXXXXXXXXXXXXXXXXXXXXXXXXXXXXXXXXXXXXXXXXXXXXXXXXXXXXXXXXXXXRQVVPGDQLIMTVELLWIKQRRFGKMQARAEVDSQLVAEGELMFSLVS

SEQ ID NO: 2318 - protein, 397 aa, Lactococcus allomyrinae
MVRRWIKTGQAHWIGRDTIQFDRPIGSETQELTLGINAGYKIIGASVTSETQEYYASETNLRTDIVKNLSTKRQYRRSRRNHKTRYRQARFDNRVKSKHKGWLASSIEVKIDNHVQLIRKLIKKLPITNIIVEAGQFDIQNLKNPDITGKEYQEGNQLGFANVREYVLARDHHKCQHCKADGLKGIKLHVRHLVSRKVGGNRPDNLIILCENCHAAYHRGEFELKKAPKGYAPASAMSIMRSTLLDRLINEFGDKVETTFGYLVKEARLTIDLPKTSMTDAFVIAGNLMADRLDFQELRKHVRCHNRQLHKAKFLKGGIRKANQAPREVHGFRLFDKVQVENKNWFVFGRRTSGYFDLRSLTGEKLNKGSYSAKKIKLVHRANSVITQYATIAPTGA

SEQ ID NO: 2319 - protein, 446 aa, Wastewater metagenome
MFKQLNFNKVLVLDTNRKPLMPCYPARAKKLLSSGRASVFRRFPFTIILHDRTGEESNLQDIEIKIDQGSKTTGVALVVHGATGHAVAFAAHIEHRTNIKFALDSRRAIRRSKRQRKTRYRQARFLNRTKPKGWLPPSLVSKAENILNWVVRFAKLTPLSKFALETAKFDTQKLENPSIKGVEYQQGKMFGYADKKAYLLERENYYCIYCGIHASQAKMEIEHVIPRSKGGTDSLNNLVLSCETCNQAKGNQDVETFLKGKPSVLKRVKKHLDTSHKDAAHMNSIRWYVMNNLRGMADAIGATLKIGFGSTTKQNRLSLGLPKDHWIDAAVCTSDGSTVKVEPNLKPLIIKAVGRGSRQFCRMDKYGFPRTSPKPRSKNFFGFKTGDMVKAVIPEGAKTKVPASTYVGRVAVRSTGYFDVKTRNTKITMSYKHCKPIHLMDGYSYA

SEQ ID NO: 2320 - protein, 366 aa, Unknown
  Ga0099741_1041_-_->_IscB_BH_Trimmed_Muscle(74,146)[72.1]
MQNLRVPVLNPDGCPAMPTKPSRARRWLKEGKARVIYNDLSIFSIQLIEEPSGRNTQQVVLGIDPGKLYTGIAAQTARATLFMAHLQLPFQTVKDRMEQRRVMRRLRRYRNCRRRPARFSNRRVKKVPPSIKANRQLELRVAKELCAVYPITLIVYEVVKAAGSKSFSPVMVGQFWMLSQLEKLRPTEQKYGWETSQVRTQLGLEKQKNHKGDTIPQTHAVDGIALAASQFLTYQQWHTKNAHGANWVGFCRVTPALFFVIRRPPINRRQLHLMVPAIGGIRRKYGGTTTRHGLRKGDLVQAEQASRVSIGWVSGDTKNQISVSNFGWKRIAQFTASKVHLIQRSTGLLVASDGKLSRLTALSHQP

SEQ ID NO: 2321 - protein, 238 aa, Unknown
  Ga0376514_000350_-_->_IscB_BH_Trimmed_Muscle(1,24)[20.6]
VEGWLPPSLKSRVHNIETWTNRLCRFCNIQAISMELVRFDMQKIQNPEISGVAYQQGELMGYEVREYLLEKWDRTCAYCGKTDIPLEIEHIVPKSKGGSNRVSNLTLACRACNRKKGNKPLEEFLSRKPGLLKRIQKQSKVPLKDAGAVNTTRWDLFRTLKKIGLPVETGSGGLTKFNRTTRGLHKTHWLDAACVGKSTPEKIFQIDKTVLIVKADGHGSRQICRVNKFGFPDNSKVN

SEQ ID NO: 2322 - protein, 432 aa, Unknown
  0137384_10001405_-_->_cas9(193,245)[32.7]
MSRIFVVDAQRNPLMPCTPARARLLLKAGKAAILRRAPLVLILKERRPEAVVQPLRVKLDPGASTSGIAVVNDRSGEVVWAAEVTHRGREIREALTRRRAVRRQRRRRQRRYRPKRFANRRRPLGWLAPSLLSRVLNLLTWVARLRSFCPIEALSQELARFDTQAMQDPTIAGIQYQQGSLAGYEIRSYLLEKWQRRCAYCQQPSTKLQVEHLIPKSRGGSDRISNVVLACEICNIAKGDRTAEEFGFVQLMAQAKVPLASAAVMNATRWRLYQELQAIGLPVEVDTGGRTGYNRAIRQLPKQHWIDAALVGTSTPEQLQLQHVRPWQITATGWQRRQMCLVDGAGFPRTRAKQRSLVKGFRTGDLVVGVVKSGTKQGIYKGRVAVRASGSFNITTDKVTIQGINHRWCRVLQRRDGYAYQQREEAAFPPTP

SEQ ID NO: 2323 - protein, 426 aa, Human gut metagenome
MAKDHYRSIDREETNLRVYVLNKRGEPLMPCSSAKARILLKEKKAVVKRRTPFTIQLTIATGETTQPVTLGVDAGYKHVGLSASTKKAELYASEIELRQDVSELLAGRSALRHARRSRKTRHRAPRFDNRKRDKGWLAPSVENRIGAHVSRVEAVLRILPVTKIIVETASFDVQRLKNPDIQGVEYQQGEQLGFWNVREYVLFRDGHECQHCHGKSKDKVLNVHHIESRRTGGDAPNNLITLCETCHKAFHRGEIELRVKRGRSFQAETFMGVMRWTFFERLRARHSEIEVRNTFGYLTKNTRITHGIEKTHCADAFCIAGNLKAKRLGYYFFQKQTRRHNRQIHKLTILKGGARKRHQTPYEIKGFRLYDKVLFQGKTAFIFGRRSSGYFDIRTLDGERISASVSYKKLRLLEKRRTYLIELRRN

SEQ ID NO: 2324 - protein, 399 aa, Unknown
  a0256829_1001599_-_->_IscB_BH_Trimmed_Muscle(67,140)[82.1]
MVRVVSIDGKNLMPTNRHGKVRRLLKDNKAKVICKNPFTIQLLYQTDDVTQKITIGVDTGYKFTGFAFIANNKVLQKGTIELRQDVSSLITLRRTLRRGRRNRKTRYRKPRFLNRTRPDGWLAPSTQSKYNHILNWIDRFTKYLPNYQLKVEIANFDIAKINNPDIEKELYQQGNMYGYENIKQYLLAREHGTCQYCKKKKNDKWHIHHIVPKSKGGSDRVDNLALLHESCHKKLHEKNDTNKISKPKQYKDATFMNIIKWKLVNDLKAKYQDKVSFTFGYITKIDRNDLGLEKTHYNDAIAITKEIVNENKSNPIYIKQVRKKKRSLHEATPRKGRRIKNTTQKRSSKNTKGITVNNKKIALYDKVKINNQIGYVSGFTGKMVYVIDIQGNYIKQSNK

SEQ ID NO: 2325 - protein, 278 aa, Unknown
  24_-_->_IscB_CTerm_Trimmed_Muscle(101,266)[161.9]
MGELLRKEVGYMLVYVINRHGKPLMPCKPQKARKLLKEQKAKVVKRTPFTIQLLYGSSGYRQDVILGVDAGSKTIGLSATTENREVFSAEVELRTDIEVELKVKRNSSFRDADFMGIMRWAFYDKLKELYSNVSLTFGYITKHARIKHNLEKSHRINARCISGNPSTKESDCWYFFKQVRKQNRQLHKTNPKKGIRRENKAPGYVHGYQLFDKVEYLGRECFVFGRRSSGYFDLRTLDGEVVSRSASVGKLKLVERASSLLCERREASFLTALKHGVS

SEQ ID NO: 2326 - protein, 555 aa, Viral metagenome
MLPQSQALESASADNRKGKDETGHGRRGNMITGMQHGREDRFLEFTSLGDSHTATSEQSEGAEARGVIAPPNSTASRVFVLDKHGKPLMPCHPARARKLLKSGRARVHRLAPFVIRVVDREIEQCEVPGVTIKIDPGSKHTGIVCASVDEAGITHGLVSIQLDHRGQLIHKRMEQRANYRRRRRSANLRYRAPRWRNRHPQACRACGKNAKHNKGYCGPCIQKRDFVDNGYRQYRLPPSLFHRVATTTAWVNRLSRWAPVTGLAMELVRFDTQVMQNPEISGVEYQQGTLAGYEVREYLLEKWDRKCAYCGASGVPLNIDHVVARSRGGTNRISNLTLSCRSCNESKGSEDAEVWCKRRFGEQNGEKIARKVTAQAKASLKDTAAVNSTRWALWRELLKTGLPVETGTGGQTKWNRKRFGIPKSHTLDALCVGEVDNIGSVPNSVLIVACTGRGKHQRTTLDKYGFVRSRLPRTKTHHGLRTGDFVRAVASKGKHKGVHAGRVIARSSGSVFVGKVDGISCKNCSVLQRADGYGYNRKEEALLISALTDGASEAR

SEQ ID NO: 2327 - protein, 559 aa, Unknown
  0207433_10050431_-_->_pfam14239(94,220)[118.6]
MATLHTSEKTHRGMLPQSPALEPVPADNPGVGTKRGTGPVPIPGTGVHHGRGETGDVCACAPRRHPSKTDEPVETESGAVTGPVAVPLSVASRVFVLGVDGAALDPCHPARARRLLACGRARVAHHTPFVIRLIDRSAEQSVTHPLAVKIDPGSRHTGMVVARVDPEGRTHGLFAVQVDHRGRQISERLTARAGYRRRRRSANLRYRAPRWRNRHPAACDACGANAIHGRRFCRPCAAAKTPGMGARESRLAPSLAHRVDGTCSMVARLARWAPVAAAVMELVRFDLQALEDPGIAGIGYQQGTLAGYEIREYLLEKYSRTCVYCDRTGVPLQVEHVRPRSRSGSDRVSNLVIACDPCNNAKDSRSVEEFLAADPDRLAKVLAGLRKPLRDATAVNATRWALHRRLQAMFPDRVSVGSGGRTKYNRTRAGLPKTHTLDALCVGRTHAVNSYPAQLVIAVAVGRGVYSRTVPDAYGFPRLQRPRTKLAHGYATGDLVRAAIPTGKYTGTHTGRVMVRTSGAFDVRTLTGRVGANRRHCSLLQRADGWRWSRQEEGHSNDS

SEQ ID NO: 2328 - protein, 314 aa, Human gut metagenome
MSTGLRAEQAEPAGIRKGDTLKVFVLNMRGKPLMPCSPAKARHMLKAGKAVVLRRTPFTISLTVATGETKQEVTLGVDAGAEHVGISATTEKEEVFASEVELRQDIKGLLADRLAFRRARRNRKTRYRAPRFNNRVRSKHKGWLAPSVENRIQAHISRIEAVCRVLPITKIVIETASFDIQKIKNPEIEGEGYQQGEQLGFWNVREYVLFRDGHVCQACKGRSKDLILNVHHIESRKTGGDAPGNLITLCEACHKAYHAGKLKQFSPRRGASFRAETFMGIMRWTVLNRLRERHPELPVTNTYGYLTKHKRIVA

SEQ ID NO: 2329 - protein, 444 aa, Unknown
  0207433_10084486_-_->_pfam14239(1,145)[158.9]
VEDSTLQPVRLKLDPGSKTTGMALVRESEEVYPDTGEVQRTAHVLKLADLQHRGHVIREALTQRASFRRRRRGANLRHRAPRFCNRTRPAGWLAPSLQHRADTTLAWVRRLQRWSPITALSQELVRFDMQLIQNPEISGVEYQHGTLQGYEVREYLLEKWHRTCAYCPATNVPLQVEHIVPRAKGGSHRVSNLTLACGPCNTAKGTQDVRAFLAQDPKRLARVLAQAKAPLRDAAAMKLFTQAEFDNLPVIDGVKQCPTGDYSSVRNFGERCVFGAESIFCRDSRFADSCIFGEKSRFGVGCSFCDRCVFGIGIRFEIWCKFGLGCIFGSETRFGDWCGFGAECVFGDRCAFGVQNRFGERCIFAGRRALPENPLLVFPGAGTDDRIVYAINVEGGPWIEGWSFSGGIDEFRAKVRVNGGGLKSRYLSVAYEVAAKWCPEKVES

SEQ ID NO: 2330 - DNA, 31 bp, Artificial Sequence
  Synthetic
ttttaccttctgtgtttccaccattcatctc

SEQ ID NO: 2331 - DNA, 34 bp, Artificial Sequence
  Synthetic
ttttaccttctgtgtgttttccaccattcatctc

SEQ ID NO: 2332 - DNA, 30 bp, Artificial Sequence
  Synthetic
ttttaccttctgtgttccaccattcatctc

SEQ ID NO: 2333 - DNA, 30 bp, Artificial Sequence; identical to SEQ ID NO: 2332
  Synthetic

SEQ ID NO: 2334 - DNA, 22 bp, Artificial Sequence
  Synthetic
gtttaacatatgagtgttagaa

SEQ ID NO: 2335 - DNA, 22 bp, Artificial Sequence
  Synthetic
attctaggcatatgtcatagaa

SEQ ID NO: 2336 - DNA, 22 bp, Artificial Sequence
  Synthetic
aaaagagtgaacgagactagaa

SEQ ID NO: 2337 - DNA, 22 bp, Artificial Sequence
  Synthetic
ttctaacactcatatgttaaac

SEQ ID NO: 2338 - DNA, 22 bp, Artificial Sequence
  Synthetic
ttctatgacatatgcctagaat

SEQ ID NO: 2339 - DNA, 22 bp, Artificial Sequence
  Synthetic
ttctagtctcgttcactctttt

SEQ ID NO: 2340 - RNA, 23 nt, Artificial Sequence
  Synthetic
gguuuaacauaugagugggcucu

SEQ ID NO: 2341 - RNA, 23 nt, Artificial Sequence
  Synthetic
gauucuaggcauaugucggcucu

SEQ ID NO: 2342 - RNA, 23 nt, Artificial Sequence
  Synthetic
gaaaagagugaacgagaggcucu

SEQ ID NO: 2343 - DNA, 52 bp, Artificial Sequence
  Synthetic
  MISC_FEATURE (38)..(45): Any "n" represents any nucleotide
tagggcgctgatgcgtttagctcaggcgaaagtcgatnnnnnnnnatcgtcc

SEQ ID NO: 2344 - DNA, 52 bp, Artificial Sequence
  Synthetic
  MISC_FEATURE (8)..(15): Any "n" represents any nucleotide
ggacgatnnnnnnnnatcgactttcgcctgagctaaacgcatcagcgcccta

SEQ ID NO: 2345 - DNA, 37 bp, Artificial Sequence
  Synthetic
cugaugcguuuagcucaggcgaaagucgatguuguag

SEQ ID NO: 2346 - DNA, 52 bp, Artificial Sequence
  Synthetic
  MISC_FEATURE (38)..(45): Any "n" represents any nucleotide
tagggcggtgggtggattcatctggagtctgggaatcnnnnnnnnatcgtcc

SEQ ID NO: 2347 - DNA, 52 bp, Artificial Sequence
  Synthetic
  MISC_FEATURE (8)..(15): Any "n" represents any nucleotide
ggacgatnnnnnnnngattcccagactccagatgaatccacccaccgcccta

SEQ ID NO: 2348 - RNA, 37 nt, Artificial Sequence
  Synthetic
guggguggauucaucuggagucugggaaucguuguag

SEQ ID NO: 2349 - DNA, 52 bp, Artificial Sequence
  Synthetic
  MISC_FEATURE (38)..(45): Any "n" represents any nucleotide
caacgtttttaacagtggccttattaaatgacttctcnnnnnnnnatcgtcc

SEQ ID NO: 2350 - DNA, 52 bp, Artificial Sequence
  Synthetic
  MISC_FEATURE (8)..(15): Any "n" represents any nucleotide
ggacgatnnnnnnnngagaagtcatttaataaggccactgttaaaaagcttg

SEQ ID NO: 2351 - RNA, 37 nt, Artificial Sequence
  Synthetic
uuuaacaguggccuuauuaaaugacuucucguuguag

SEQ ID NO: 2352 - DNA, 91 bp, Klebsiella pneumoniae
cgaaatctatcaacgacgctatttccattgttcgctcatatctccgttaactctgccaggcagacgtctgatggggtcagtaaaaacagta

SEQ ID NO: 2353 - protein, 16 aa, Klebsiella pneumoniae
TKSINDAISIVRSYLR

SEQ ID NO: 2354 - DNA, 145 bp, Escherichia coli
cgaaatctatcaacgacgctatttccattgttcgctcatatctccgttaactctgccaggcagacgtctgatggggtcagtaaaaacagtagtcaatcacccctccctgaagggagaggcttgtaaaagagcctgagattgacca

SEQ ID NO: 2355 - protein, 16 aa, Escherichia coli
TKSINDAISIVRSYLR

SEQ ID NO: 2356 - DNA, 71 bp, Klebsiella pneumoniae
ataaaaggatatgactatgaaatcacgtgcagctgtagcatttgctcctggtaagcccctcgagatcgttg

SEQ ID NO: 2357 - protein, 18 aa, Klebsiella pneumoniae
MKSRAAVAFAPGKPLEIV

SEQ ID NO: 2358 - DNA, 145 bp, Escherichia coli
gagagaggcgtttgctttgcaaacggcgctatccctccccgccatgaatgacggggtttctcgcgcaaaattgataaaaggatatgacatatgaaatcacgtgcagctgtagcatttgctcctggtaagcccctcgagatcgttt

SEQ ID NO: 2359 - protein, 18 aa, Escherichia coli
MKSRAAVAFAPGKPLEIV

SEQ ID NO: 2360 - DNA, 46 bp, Artificial Sequence
  Synthetic
atattcacgagaagtcatttaataaggccactgttaaaaagcttgg

SEQ ID NO: 2361 - DNA, 46 bp, Artificial Sequence
  Synthetic
ccaagctttttaacagtggccttattaaatgacttctcgtgaatat

SEQ ID NO: 2362 - protein, 656 aa, Artificial Sequence
  Synthetic consensus sequence
  misc_feature (2)..(47): Xaa can be any naturally occurring amino acid
  misc_feature (49)..(50): Xaa can be any naturally occurring amino acid
  misc_feature (52)..(75): Xaa can be any naturally occurring amino acid
  misc_feature (77)..(78): Xaa can be any naturally occurring amino acid
  misc_feature (80)..(80): Xaa can be any naturally occurring amino acid
  misc_feature (83)..(83): Xaa can be any naturally occurring amino acid
  misc_feature (93)..(103): Xaa can be any naturally occurring amino acid
  misc_feature (105)..(105): Xaa can be any naturally occurring amino acid
  misc_feature (107)..(112): Xaa can be any naturally occurring amino acid
  misc_feature (114)..(114): Xaa can be any naturally occurring amino acid
  misc_feature (117)..(130): Xaa can be any naturally occurring amino acid
  misc_feature (135)..(135): Xaa can be any naturally occurring amino acid
  misc_feature (137)..(140): Xaa can be any naturally occurring amino acid
  misc_feature (142)..(142): Xaa can be any naturally occurring amino acid
  misc_feature (146)..(150): Xaa can be any naturally occurring amino acid
  misc_feature (153)..(159): Xaa can be any naturally occurring amino acid
  misc_feature (162)..(167): Xaa can be any naturally occurring amino acid
  misc_feature (169)..(170): Xaa can be any naturally occurring amino acid
  misc_feature (173)..(174): Xaa can be any naturally occurring amino acid
  misc_feature (177)..(177): Xaa can be any naturally occurring amino acid
  misc_feature (180)..(182): Xaa can be any naturally occurring amino acid
  misc_feature (184)..(184): Xaa can be any naturally occurring amino acid
  misc_feature (186)..(215): Xaa can be any naturally occurring amino acid
  misc_feature (218)..(223): Xaa can be any naturally occurring amino acid
  misc_feature (225)..(231): Xaa can be any naturally occurring amino acid
  misc_feature (233)..(248): Xaa can be any naturally occurring amino acid
  misc_feature (255)..(265): Xaa can be any naturally occurring amino acid
  misc_feature (267)..(274): Xaa can be any naturally occurring amino acid
  misc_feature (276)..(278): Xaa can be any naturally occurring amino acid
  misc_feature (281)..(281): Xaa can be any naturally occurring amino acid
  misc_feature (283)..(285): Xaa can be any naturally occurring amino acid
  misc_feature (288)..(288): Xaa can be any naturally occurring amino acid
  misc_feature (290)..(290): Xaa can be any naturally occurring amino acid
  misc_feature (292)..(293): Xaa can be any naturally occurring amino acid
  misc_feature (296)..(297): Xaa can be any naturally occurring amino acid
  misc_feature (299)..(300): Xaa can be any naturally occurring amino acid
  misc_feature (305)..(307): Xaa can be any naturally occurring amino acid
  misc_feature (309)..(314): Xaa can be any naturally occurring amino acid
  misc_feature (316)..(320): Xaa can be any naturally occurring amino acid
  misc_feature (322)..(322): Xaa can be any naturally occurring amino acid
  misc_feature (325)..(325): Xaa can be any naturally occurring amino acid
  misc_feature (329)..(337): Xaa can be any naturally occurring amino acid
  misc_feature (340)..(341): Xaa can be any naturally occurring amino acid
  misc_feature (344)..(344): Xaa can be any naturally occurring amino acid
  misc_feature (347)..(348): Xaa can be any naturally occurring amino acid
  misc_feature (351)..(351): Xaa can be any naturally occurring amino acid
  misc_feature (353)..(355): Xaa can be any naturally occurring amino acid
  misc_feature (359)..(360): Xaa can be any naturally occurring amino acid
  misc_feature (362)..(362): Xaa can be any naturally occurring amino acid
  misc_feature (366)..(367): Xaa can be any naturally occurring amino acid
  misc_feature (370)..(379): Xaa can be any naturally occurring amino acid
  misc_feature (381)..(389): Xaa can be any naturally occurring amino acid
  misc_feature (391)..(399): Xaa can be any naturally occurring amino acid
  misc_feature (401)..(406): Xaa can be any naturally occurring amino acid
  misc_feature (408)..(410): Xaa can be any naturally occurring amino acid
  misc_feature (412)..(414): Xaa can be any naturally occurring amino acid
  misc_feature (416)..(416): Xaa can be any naturally occurring amino acid
  misc_feature (418)..(419): Xaa can be any naturally occurring amino acid
  misc_feature (421)..(428): Xaa can be any naturally occurring amino acid
  misc_feature (430)..(431): Xaa can be any naturally occurring amino acid
  misc_feature (433)..(435): Xaa can be any naturally occurring amino acid
  misc_feature (437)..(442): Xaa can be any naturally occurring amino acid
  misc_feature (444)..(444): Xaa can be any naturally occurring amino acid
  misc_feature (446)..(447): Xaa can be any naturally occurring amino acid
  misc_feature (450)..(451): Xaa can be any naturally occurring amino acid
  misc_feature (454)..(463): Xaa can be any naturally occurring amino acid
  misc_feature (465)..(474): Xaa can be any naturally occurring amino acid
  misc_feature (476)..(486): Xaa can be any naturally occurring amino acid
  misc_feature (488)..(496): Xaa can be any naturally occurring amino acid
  misc_feature (498)..(505): Xaa can be any naturally occurring amino acid
  misc_feature (507)..(507): Xaa can be any naturally occurring amino acid
  misc_feature (509)..(512): Xaa can be any naturally occurring amino acid
  misc_feature (514)..(527): Xaa can be any naturally occurring amino acid
  misc_feature (529)..(559): Xaa can be any naturally occurring amino acid
  misc_feature (561)..(568): Xaa can be any naturally occurring amino acid
  misc_feature (570)..(583): Xaa can be any naturally occurring amino acid
  misc_feature (586)..(590): Xaa can be any naturally occurring amino acid
  misc_feature (593)..(594): Xaa can be any naturally occurring amino acid
  misc_feature (596)..(604): Xaa can be any naturally occurring amino acid
  misc_feature (606)..(607): Xaa can be any naturally occurring amino acid
  misc_feature (609)..(624): Xaa can be any naturally occurring amino acid
  misc_feature (626)..(650): Xaa can be any naturally occurring amino acid
  misc_feature (653)..(653): Xaa can be any naturally occurring amino acid
  misc_feature (655)..(656): Xaa can be any naturally occurring amino acid
MXXXXXXXXXXXXXXXXXXXXXXXXXXXXXXXXXXXXXXXXXXXXXXRXXHXXXXXXXXXXXXXXXXXXXXXXXXMXXVXVVXKBGKPLMPTXXXXXXXXXXXGXAXXXXXXPXTIXXXXXXXXXXXXXXLGIDXGXXXXGXAVVXXXXXZVXXXXXXXLRXXXXXXLXXRRXXRRXRRXXXRXRXXXXXXXXXXXXXXXXXXXXXXXXXXXXXXNRXXXXXXNXXXXXXXCXXXXXXXXXXXXXXXXWLPPSLXXXXXXXXXXXVXXXXXXXXPXXXIVXEXXXFDXQXLXXPZXXGXXYQQGXXXGXXXXXXAXXXXXGXRCXYCGXXXXXXXXXLEXXHVXPRXXGGXBXXXNLVXXCXKCNXXKGXXXXXXXXXXFXXXXXXXXXLXXXXXXXXXYXXXXXXGXXXLXXXLXQXXPXXXXXXXXGXXTXXXRXXXXXXKXHXXDAXXIAXXXXXXXXXXPXXXXXXXXXXDXXXXXXXXXXXFXXXXXXXXXZXXXXXXXXRXRXXXXRXXXXXXXXXXXXXXPXXXXXXXXXXXXXXXXXXXXXXXXXXXXXXXGXXXXXXXXNXXXXXXXXXXXXXXPVXXXXXKGXXVXXXXXXXXXRXXVXXXXXXXXXXXXXXXXGXXXXXXXXXXXXXXXXXXXXXXXXXPPXSXX

SEQ ID NO: 2363 - protein, 1263 aa, Unknown
  Cas9_758 protein sequence of Fig. 58
MSTVEYKLNPLPKAEPPYDWKNDPFYTDAVALGIDIGLEGIGVWLRKGWKPIYTRTFLFETPDAAPLEGRRGLRAGRRCRQAERRREVALKKFCDDFGLPWVEITDKGRDDGPFRFRWIATRKDVEGLRDARAFSACLRHIIRHRGYDWHAPEDGGDYPWGDEAKAKDAIEWAKTAFCQQEHADKLRYILTDCGWADKERQAFETALNHAVEKYKTQGIDAVLAEHFSQPKNNLRFPARRHNFPREMVWAHLTDIVQKHPQFVGGVERVKEALNQLHEIINDHRKEPGALALRKVNRCPLAEILFNGSAPKCDSSKNRHIRRFKLLEFLATRTFVRKDGTRILASRGLFGWLLDDLLEADIQALDSNGKIQRGKISMREFKKQFVAKHDSTGETELAGDTQSHNGEFFIQLTDLLWPKMSELGGRASLCARSAEALFDYAKKEGFDAAQIAVRLKDKRFERAGKKMSFYEIRQTAAAGFGIYKQVEFLLGRWKKNAKPGDKPAVPGKLRQVFAQLIKDGILPPDKTAPDYVVVETVGDIPRNREQAKEIQEAQAARRKFKDKLREQFKDFERGNLSWEETNKRLLLYDQQRGICPYTGDSLGENPLAHDLEIDHVFPRTRGGISEMVNLVLTHRKTNGEIKREQTPYEAFGGKNNSPQWREIRDRVLKMQWNGQKREFFLRSEDTPPDWGNMTRVAQLARQLRFEVARWMDIADDDAKVRQFIGTPTGYQTSVCREAWGDKLPEDFWPKKNRDNLRHHMWDAAILSHIPPGKGLNHVRCHGIFWSETNRGNIKLLALPQLGPDLKQFEKETAGLCLVAKIQPAHNKQSRFQQTIYSPPDENGLMWARDPIEKLADKPKLLELLRDAGIDEKQLPASRFNEWQEKRQAQFFTREEALSAVEALALPTDNQILVAVFEEWWTDRLKGDKKRVTDKSLRALLAKARVPKALVTDQQLAGVLINRGNPGPLTRKDGTIIRGISGSASTMTPMAVIPHRNHEGETIGFKLATETFIRAEIWTTEKRDKNGEVVKDEDGKPLLDYHRRLIPHPRGLKNLGLRKMQCTGERLAWERALTDAEIIELGLKENAEVKRLRKNYDKAVKFQEKEISKSKVAESELTLANAKAMPLKPKPPVISLRKIFTGLPPLAKRLKAADGTDVSRFAKGDLMLVPLTQDAEICQPKQAPYRKFWFRVAALKTNGQIQLLIAERKQTKPLTDQEIKDGEKLTPDQDWLIKAGVKQPGDDAVIAFLLRHTHGHDQPPHSAKK

SEQ ID NO: 2364 - protein, 775 aa, Unknown
  Cas9_1261 protein sequence of Fig. 58
VVVRPQGKLDHIPIPKPERGGITIRSENVLGIDFGPEHVGLALVRREPAGEQVLYAASITLRDLSPVMKERRALRRQRRSESWYRQPRVPQRGGGSARGAGAQEDEQAVEGVPEEEEEDRSRARSAPEYRRAQGCNKPKRKCKYVDPKTGEVCGANTPRKEKVRDLLLWDICQHLPVEPEQRLAILSYVNQVNIVRPEVLACLALEERALLENHRALARASKSKPLPQLLCELKIKKQLQSQILAIASGDPERKAADLKGRMAFCRKHFLLHHQQTRIPKPSAWLPPSIRCRHADLERVCREEVAPRWPVHRIRLERAQFDLQAIQRDPQGRGKDWDPEEWQRGPCWGRRNIYSAKRHEQGNRCAYCGKEPKKENRLELEHVKPGGGNTWDNLVLACRKCNQRKGKAEARGAGLKFSVDPDTGVSLAPRGLGESVVARYMTQTDQGYRELVARLQQLFPDAQIEYRYGYQTDHIRKRWIGSAQFAETALSLGYKQSPPRPKKRRKQWSELAHLKRKPRRHSDPLKSHVMDAVAIAGSLQRDSPELCQADKITIRPSRRQLFDTNPLGRGSDGRFYQRVKICGTQGGLSFRRVKHVVDARKRAILERVARDLLIEQAKGNEESPPSAFTPDAAQLIPFTSVRLAKRDASKTNTRRLHAPDDDRLPQQKGGHWYKAAGGPNWATVVYRLGGREQVAVLRNPAAFPDASSDIPAGAQVLFSFRKGKLVSFEQDGQTTRARITKNNSDGTLTVERLDDGREVTRSARCFRPVPLLAPNA

SEQ ID NO: 2365 - protein, 671 aa, Unknown
  Cas9_665 protein sequence of Fig. 58
VNTETREQVLGIDFGPKHVGIALVARGASSEEVLFVAEVRLRDRKSLLADRRALRRGRRGRKRYRQPKIPQRGGGATSQSGEESERGRAAAPEYRRATGLNTGRRRCKFVDPQTGEICGWNTPRKANVRDLLLWNICRHLPVSVSEQAGFLAYVNQTNLHRAEILGALPAEEQAPLEAVFSQQRRPKDERLKDRLRRLGVDRHLRSQVTDIVGITSRRPLSGRLSFCREHFLRHHEQSRVPRPSVWLPNTVEMKQADVLKVCRQEVAPRWRVDCIVLERANFDLQLLRQQTAIEWSVEDWQRGPRWGYRNTFEAKKQEQGNRCAYCGSKPTAKNRLRLELEHVIPGGGDTWENLVLSCRKCNEGKGNRSPAQAGMRFWTDTETGETLSPAPLGAAHVSRYMTQTDQGWRRLQAALQQVFPQAAHEVTWGYVTSFYRNRWNLPKKHFVDAAVIASSHELERPVSVPEQPQRFAPTSGGKQLFDTNPLSKRPEGRFAQSKAIVCEQGTLAFKDVAKVENPRKRATLQRVADEATAAAKARGETPPTAFTAEMLPKIPFKSVRLAKQDASDTNTRRLGRBWFKVASAVNIATIVYQLDGKVCMQLQRNPAVFRHDPGLPQGARVVATFRKGDLVECDAGRGRVTKNHSNCTLTVELLDSGKEVTRLAKSFRPRH

SEQ ID NO: 2366 - protein, 763 aa, Unknown
  Cas9_1079 protein sequence of Fig. 58
  misc_feature (206)..(207): Xaa can be any naturally occurring amino acid
MEKELVLGIDYGGKYIGLAVVNQKNNQVLYARTVKMRDDVTDILAGRREQRSLRRTLQTKKKRLRELKNYLESIGGIYEESSGTFTIEPFRTVYSLAHKRGYDYADLPEEKTSEEIEAMDAKERKQWEKEKKELEETQRNSRHRDEVLRDVRNVMTEGNLSEEQIIKVESIFNKQYRHKRFNNRILTKCKVCGKNYPLRINVREIXXIENIVRYLPLQNKERELLKLTILKGHQQDINEIFKHFRKVYKITLNQKDWPGKNLIDIARNQLRGRLLFCKVHFPENEKYVSIEKKTFRLAPSLKTKIENVLSVIKDDILPNFTLNNVVMESNNFDIAAKTKGKKRLLKEEYSKGHRESGETRKEALLRETDSRCIYCGKGIDLSNAHEDHIFPRKAGGINIFGNLVACCSVCNEEKRGRTPLESGILPKPEIVSFITNDLKKKILEDAQYINTLDFNKYMSHASIGWRHMRDRLRELTGNKELLIKRSQGIYTAYFRKWWGFIKERGNHGHHALDAVILASKKSYAEDGKVDMTIKPCGEDGKEFDIERHLSEMKEFRRDKGGKSAPLHDRNPLSFKNDIITRRFMVTEIECGKEAVIISEEYRKKLTEAFKRFGIAKGKYLTDEQAKDAGFYLRKNGEGVMSLKCEVKGTGYNQMIRIKNNIFKTNVHNVGVAVFLDEKGKKRACELKNPRLSKHFVKPAEQVKGKVIFILKRGNMVTVEGEEMIYRVKKLGTSPVIEAIVGSDGKTRTVSATKLLKINHTKKV

SEQ ID NO: 2367 - protein, 531 aa, Unknown
  IscB 2089 protein sequence of Fig. 58
MKVFVVDKNNNPLMPTHPAKARILLKNGKATVKRVEPFVIKLNYTIDNPKTQNVKVGIDDGARNAGLAVVVEKSKKDDEVVFKGQIDLNNMIKDKMEERSNYRRCRRTRLRYRKPRFNNRKRNKCVVCGGNTQSGKNTCRLHKVTDKQNKLKNTYWLPPSLKARKDCIVRVLNQLNKWIPINNIIIETGRFDIQKLVNPDLSGAGYQQGAKYGRDSVKSALIYEYGKEVRDENNKIKKIARCCYCGKEGVPLEIEHIKPRGQGGTDAWHNLTLACKKCNKEKGNRTPQQANMKLIVKPSKFHLSKTLKYAAQLQQGKNYLRQAIKDAVNIFPSYTYGQFTSWQRKRFNIPKTHMNDAIVIAITNYDTENKPRLPVVNCDEYYIKPIGTKSRSLFTATCYSPKDYCYNNEGKRKRINSINAAVLTNNNKTIRALKEINKACVLLEKNNKIVPKAIRMIEDIPDNAIMVVEKGDTVECNVGKKKLRGIVSACMSNGNIKINVQGKQQSASLKKTRLIYKKQNIIFQKIHKTTK

SEQ ID NO: 2368 - protein, 410 aa, Unknown
  IscB 50962 protein sequence of Fig. 58
MSKAFVLSLDGKPLMPMQYNKAWVFIRQGKARLVTFEPLTVQLTYRTATEATQPVRVGIDDGARTAGVAVVVEREQRGPEVVCAGEIRLRGDTKALLAARRQRRRRRRRQKRHRQPRSRRSKGKGWLPPSVRVRKENILRVVADLVWRAPISRIVWEEGQFDTHRLVEPEVEGATYQQGPGYGWENRRHAVLFRDGYRCQYCGEELVAAGKIAEVDHVIPRSRGGTDTFENLVCACRECNQRKGEQTAAEFSHPEVGGRTFAYPAYLQSGKRYLREGLEQLSSVEVVFSWQTKRWRKEMGLEESHVNDAVAIAVQGAETESPQGWMQIVARRRRRNFKRLKWKEKWGLRHWDLVCYTKRGGRKVVGTVRGFVESREEVKVRHAGCMNDPLKAKRVQLLQRQVAIAYAPWG

SEQ ID NO: 2369 - protein, 516 aa, Unknown
  IscB 61900 protein sequence of Fig. 58
MPTVYVLNKDGKPLMPTTRCMHVRHLLKNGKARVVKSKPFTIQLLYETDDVVQPLYLGIDPGRTNIGVAVVKADGAAVFTAHLETRNKEVPKLMKKRKESRCARRTNGRRCRRQRRAKTNGTISKKCVKQTTAQNGSVSKRAKEIGVIKRHLPGCEKDVLCVGIKNKEAKFSNRTRQEGWLTPTANQLLQTHSNLIKKIRKFLPISNVVLEINKFAFMQLDNPNIQKWQYQQGPLYQKGSLENAVSEQQDHHCLFCEKTIEHYHHVILRSENGSDTIANIVGLCAEHHDLIHKDDKLKEELAKKKQGLNKKYGALSVLNQIIPALTYELGSRFQGHFYVTTGKSTYDYRAAHSVSKDHWLDAYCIACSVLPDGCFDNTINSRVPYELKQFRRHDRQVCQQQNVKRKYYLDKKLVATNRHKAIKQETDSLEEYRNNGGTTDKLVVKEHKPTNKRLNRILPGALMAANGKLNVMVASRGLHNGIPDNYVFDNNSKAKPSKCMLINKNKGIVFVSNSVS

SEQ ID NO: 2370 - protein, 519 aa, Unknown
  IscB 20209 protein sequence of Fig. 58
MRQHHGIVTVAVVDKNGHPLMPTNSYRARHLKKSGRAVTYAHRPVYTIQMLDVEFDPEKNMVQEIEVTCDTGYEHIGVSVCSEKHEYLQREYDLLTDETEKHNDSRKYRRTRRNRKRHRAKMSRNRKGVIVKDGFAPSLRNKRDRHIDIITSLCFVMPITDVHVEMGEFDTQALKAIEEGKPLPQGTDYQQGEQYGYLTLRAAVFSRDNHTCQCCGRNAFSDKAMLHEHHIGFWKGDRTNRMANLLTVCEQCHTPKNHKPGGTLYGLEPKLKGLKGATFMTSVRWNMVNKLKEALPGISVHITYGAATKQSRQQLRLRKTHANDAYAVGNFHPKHRAHLEHFKKRRRNNRVLEKFYDAVYIDTRDGTEKMGSQLGCNRTKRNIPRNNPNNERKYRGEKKAKGHRSIRKQHYTLSPGDKVWCSTDKKMYIVNGMQNNGATVQLRTTKVVPLDKLQPMKKKGKTIPIAANQKLALISAKEKHTVLSVDEGTNTAVMRWFKGVNPSTLTRVSSYKTGWERIK

SEQ ID NO: 2371 - protein, 543 aa, Unknown
  IscB 51558 protein sequence of Fig. 58
MLHQSQALELVSADNPQVGTKRDTDTTAGASAGGVAGIQPGRDEIPTPRDIHSVGASLVSKPSGEGTTSGGNPGNPVQRVFVLDKRKKPLDPTSPARARKLLKKRRARVHKLVPFTIRLTDRLLEDSVVHDHTIGIDPGSKTTGIALFRDTEVANTDTGELTTDRTGLFLMELNHRGSMVSKKLGQRANYRRGRRSRNLRYRAPRFDNRSRPKGWLPPSLQHRVDTTMTQVHRFQKLLPVTGIAYEAVRFDTQKLERPEITGVQYQQGELFGFEVREYLLTKYGNTCVYCDTTDTVLNLDHVVPRAAGGSNRVSNLVTSCIKCNHAKGKQPVEIFVTNRARLARIKRGLKQPLKDAAAVNATRNALHRALLTTGLEVQAFTGGRTKYNRTQLRIPKTHALDALCIGHIDTVTSYPAQTLDIIAMGRGSHQRTNVNKHGFAIGNPKTRAKRHFGFSTGDLVKAIVPKGKKVGTHVGRVAVRTTGSFNIRTATETIQSINHKYCHLLQRADGYAYYQEPTAIPHASQDSGVFTQTRRNLPIAQLR

SEQ ID NO: 2372 - protein, 4 aa, Artificial Sequence
  Synthetic
PLMP

SEQ ID NO: 2373 - protein, 432 aa, Ktedonobacter racemifer; identical to SEQ ID NO: 2059

SEQ ID NO: 2374 - protein, 429 aa, Ktedonobacter racemifer
MSNVFVIDSDYKPLNPVHPARARLLLTQGNAAVYRRYPFTIVLKRVVDQPEVHPLRLKLDPGSKTTGIALVNDTNGKVVFAAELEHRGHAIKDSLDSRRGVRRRRRNRKTRYRKPRFQNRRRKKGWLPPSLESRLANILTWVARLCRSAPITALSQELVKFDLQLMENPDITGVEYQQGTLQGYEVREYVLEKWKRTCAYCGKQDVPLQIEHIHPRANGGTHRISNLTLACEPCNIAKGTQDIAVFLAKKPDVLKRILAQVKKPLKDASAVNATRFALLERLKAFGLPVECGSGGLTKYNRTTRGLAKTHWLDATCVGKSTPSAISHKGVVPLLITANGHGRRQMCVPDKYGFPEKHKQRRKTFLGYRTGDMVKAITSKGTFEGRIAIRHRPSFRLGKVDIHPKYMHCIHRADGYEYTQKGVRNAPPHV

SEQ ID NO: 2375 - protein, 433 aa, Ktedonobacter racemifer
MEPSMIYVLSVSGQPLMPTKRHNKVWYWLRRGLAKVVRREPFTIQLCFETSTHTQPVAVGVDTGSKTVGVAATTNGEVVYQAEVHLRTDISGKMTQRRTYRRNRRARKTRYRAARFANRRRQAGWLPPSLRSKAEATVKAVRLIASLLPVGTVNVEVGNFDTQRMQHPQISGLDYQQGTLQGYLVREYVLEKWKRTCAYCQARGVPLELEHIVPRSRGGGSRESNLTLACRPCNERKGQQTAAEFGFPQIQAQARVPLKDAAHVSAIKTSVLQQLRSLFGTAQVSVTYGYETKYKRIQVLGLPKSHTNDAVAIACEMGERVKPREEVYQIRCLPRGQYQRFNGRHSEHKCWAPRKVRGYKLYEVVKAKGVVGYIGGRREKGAFIIKEVSSGKKLLEVVPSKLERVARPTQGWMITRKPVVENLEKEDGASSPS

SEQ ID NO: 2376 - protein, 421 aa, Ktedonobacter racemifer
MNIVYVLSPERQPLMPCAPAIARLLLKERKAKVMRRTPFTIKLISRPETICTQPLTLGVDTGSSVVGSAVADEQGSVLYLSEVELRNDIATTMKERAMKRRTRRTRKTRYRPAHFLNRKHSRKQDRFSPTMTSKIDAHLREIRFVQSLLPIQSIVLETGTFDPHALKNPEVLHKKWLYQKGINYGFANTRAFVLTRDDYTCQQCTGASKDQQLEVHHLVFRSQNGSDEETNLVTLCKTCHDSLHAGTITLKKTGKKKGKLLHATQMNSIRVQLLKRVEAEETWGFVTKEHRLLAGLPKEHIFDATMIATRGVKPTFCTTSILSKRCVCDGDYQQTKGVRSEQRIATGKIMGFRKFDKVRYLGQEYFIKGRMSTGYAILMDLSGNKVALKPIPKFDKMKRVSARSSWMMTQRTMPHSSFSLR

SEQ ID NO: 2377 - protein, 438 aa, Ktedonobacter racemifer
MSRVLIVDAERRPLMPCTPARARLLLKAGKAAILRRFPFVLILREARPEAVVEPLRVKLDPGSKTSGIAVLHEQSGEVMWAAELTHRSTPLREALAKRRAVRRSRRSRHTRYRAARFANRRRPKGWLAPSLESRVLHLLTWVKRLSRWCPVGALSLELVRFDLALLQNPSIEEVEYQRGTLWGTEVRQYLLDKWQHRCTYCQASEVPLEIDHVSPRSKGGSHRIANLVIACRPCNQAKGDQPLESFLANRPDVLARVQVQRRAPLHDAAAVNSTRWQLYERLKALDLPVETGSGGLTKWNRQSRNLPKTHWIDAACTGRSTPERLQIRHVRPWLIQAQGRQARRMVNVDKRGFPRGKAKGPSGICGLRTGDLVRAVVTKGKKIGTYVGRVAIKSDGYLKLTGRPFGMVEGIHARYCRPVHRNDGYAYAQGEAALPPQA

SEQ ID NO: 2378 - protein, 392 aa, Ktedonobacter racemifer
MVYVVSADRTPLMPCSAAIARLLLKEGKAKVVRRTPFTIKLSAQPERTYTQPLTLGVDTGSAVIGSAVASEQGSILYLSEVEVRNDIATTMKERATHRRDRRNRKTRYRPARWLHRRNSIKTGRFSPTMRSKIDAHLREIHFAHSLLPISSIVLETGTFDPHALKNPEVLRKKWLYQKGINYGFANTKAYVLTRDGYTCQHCQGKSKDQRLEVHHIIFRSQHGSDEESNLLTLCKTCHDALHAGMITLKHTGKKKGDLLHATQMNSIRVQLLKQVEAEETWGFVTKEHRLLAGLPKEHCFDAAMIATRGNRPVFQIQTVFVKKCIPDGEYQQTKGKRSEQRIPTGKIQGCAQMRQSALSRSGILYQRAYVYWLCYFDDDRREKGRFETHSQV

SEQ ID NO: 2379 - protein, 429 aa, Lactobacillus equi
MPTSRLGMVRRWLKSGQAIWYGNSRNTIQFVRPITTNAQELTLGVDAGFHLGLSVVGNQREYYASESVRKSEKDKITARREYRRTRRNRLRYRKPRFDNRKRPDSWLAPSIQHRLDFTIKEIKRLYNFLPISKLVIEVSPFDNQKLLNPNIKPWEYTQGKMQGFKDVKDYLLARDVNRDALDGKIYPASQLRVHHLVQRKDGGTNQPDNLVLLSDRNHNQANHNNGVLAKLAQNRQNSIDYKGAYFMSILASRLPNYFDSYIETQGYITANLRKLYGIEKSHLNDAFVIAGGTNQYLRTSNVYSRTKVANNNRSLQKFYDAKYIDSRDGKKKSGKELSSGRTRRSREINYDNQRIYRQEKVSKGRVSIRRQHYQLRPHDIIRNLKTNKIEIVKGVINNGNSVLFQTGKSVTTKKVKCLYHINGLREEKI

SEQ ID NO: 2380 - protein, 451 aa, Petrotoga olearia
MVYVLSKDGAPLMPTKRHGKVKHMLKDGKAKVVRNKPFTIQLTYDTPHYTQPITLGIDSGYKYIGFSAVTEKGNTPNGVKEEVLSGEVNLRSNVSELLKERSMYRRIRRNKLRYRKSKFDNRVSSRKETPRKGFKESWLAPSIKHKLDTHIRFIEFIKKILPITNIVIEVAKFDTQKIKNPEIKGKEYQQGEQQNFYNLREYILYRDNYTCQLCGKSNVPLEVHHIGFWKGDRTNRPSNLITLCTKCHDPKNHLKGGKLYGMKPVQKPLKEATFMSTVRWKLVNILDCKYTYGYITKSKRIKLNLDKTHYNDAYCIAGGTSQRRIEPIYFEQIRRNNRSLEKFYDAKYIDTRDGSIKKGQELFNGRRTRNKNYNTENLRKFRGQKISKGRRSIRTQRYFYQPKDLVIYEGKKYTVKGIHCCGKRIILAELSKSFKIETVEPYMFRKGLCIT

SEQ ID NO: 2381 - protein, 447 aa, Petrotoga olearia
MQRVFVLDKNKRPLMPCHPARARELLKKGKAAVFRYHPFTIILKDRAGGDTQPTHVKIDPGSKITGVALIGNFKNGKKVIWSAEIQHRGQSIKKALDTRRALRRSRRNRKTRYRKARFDNRERSKDWLPPSLMSRVENILTWIKRMRHFALITGISMELVRFDTQKLQNPEIKGIEYQRGTLYGYEIKEYLLEKWGRKCVYCGKENVPLEIEHIIPKSKGGSDRISNLTLAFHECNQKKGNQSIEEFLANNPERLNQIKSESKKSLKDTAAVNATRWYLFNQLKKERLLIEVGTGGKTKYNRETQNYPKKHWIDAACVGESGQNVQIEPDMQVLEITAMGHGTRKMCNVDKYGFPRSHRRAKNAPNGVKGRTYMGYKTGDIVLAVIPKGKNAGIHIGRIAIRQQPNFKLNDLDGINPKYLRLLQRNDGYGYQTARKEGEKLLHSSYH

SEQ ID NO: 2382 - protein, 445 aa, Petrotoga miotherma
MLVFVFNKHGEPLMPCKPSKARKLLKGKKAKIISYEPFTIQLLYGSSGYKQGVSIGIDIGSKHIGVAITSENKVLVKGEIELRQDVSSLLTTRKTYRRSRRFRKTRYRKSKFLNRKRKEGWLPPSIESRISNTFKWIDKFASLVPNPKLNIEVGKFDSHKFVNPEVSGKDYQKGQMHGYDDIRYFVFERDNYTCEVCKKKGVILQTHHIKYKSKGGTDNPNNLITVCADCHTPENHKPGGIFWEWMTKSKKPKAYKEHPFMNIIRKRIYQRYPSANIVYGFWTTPRRKELGLSKTHYNDAIAISGIDFIKKNVDSVFEIRQVRKKKRSLHEATARKGRKEPNRDQIRNSKNTKFYKSFYLNDLVKVFSRKGWITGFTNGGAYIKDIFDNYITMPNKSYKQVSLKNIQFISHNNNWQFVPHMKEGDLLLNGKENQLSSLIKQPHGR

SEQ ID NO: 2383 - protein, 434 aa, Lactobacillus composti
MQNRVFVINRQGEPLMPCKQRKCRKLLQSGKAKVIKKEPFTIQLKYVSTGYKQPLAVGVDSGQHHIGLAVTSQNKVLFQGEVSLRQDVKKLLDTRRIYRRGRRNRNTRYRQPRFLNRARSAGWLPPSVASKVQHNINWIRRFQAVLPKTELHIEVGKFDMAKMVQPGITGLGYQQGDLYGYETAKQYVLDRDNYTCQICHGKSKDPKLKIHHIIYRSNSGTNQVSNLLTVCATCHSLANHQPGGKLYDLQAKKFQSHRSLKGATFMNILRRRLFTAFPEAKFQYGAQTTLDRAKLDLEKAHYNDAVIISGIQKNAQRPTAVVMFHQFRKKKRSLHEATARKGRKVPNITSKRNAKNTKFSRGFYLNDYVQLPNGQKGNISGFSSRARCFVKAGDGNYLAISSKYKHINLSELKVIRHQNNWNVAEINTADYLMA

SEQ ID NO: 2384 - protein, 442 aa, Lactobacillus equicursoris
MKHENANRVFLLNRDGKPLMPCRPRKARLLLKSGKAFVVKKYPFTIQLKYGSYGYKQKVSLGVDTGQRHIGFAIVSQNKVLYQSEVELRQDVHKNLYTRKIYRRSKRNRKTRYRQARFLNRVHGKRDGLWLPPSVKGKVNHNIAWIKRYLAVLPNPDLHVEVGKFDMAKMLNPQISGKQYQEGSLKDWKNYEYYVLARDEYTCQLCHKHGEGVKLVVHHIVYRSQGGTNRVDNLITLCTDCHTTKNHQPGGKLYKWMKVKKKVTKQLKGATFMNILRKRIMTAFPEASFQYGSQTYVDRKNLLLPKGHFMDAIAISGIKSVGQMPDTVTLISQFRKKKRSLHEATARKGRKQPNTSSKRNEKNTNHARGLWLNDYVRVIGNHAKGYVKGFKSNGYYVYLTNGLGNYVLNNGKNYINGQQCRLIMHNGNWQKAEQKLSLNEFK

SEQ ID NO: 2385 - protein, 443 aa, Caldicellulosiruptor bescii
MVFVLNRDKTPLAPCHEAVARKLLKHGKAVIHRIYPFTIRLKEQKDTSTFKPNYRLKIDYGSRCTGIVILKNNCEVVFMMKLYHRTEIKENMDRRRSLRRSRRNRKTRYRKARFSNRRRDENWLPPTLLSRVRNIETWVKRLCKLCPVTAISYENVKFDTQKLRNPEISGIEYQHGTLQGYEVKEYLLEKFNWRCVYCGATGVPLEVEHVIPKSRGGTDRVDNLVIACHGCNQKKGNKTAEEFGYPEIQKLVKAPLRDCALVNATRWRIYEVLKNTGLPVECGSGALTKMNRIKLGLPKDHHFDAICVGYSTPNRIWLKTKTVLHVIAKGRGTRQIAILDRYGFPRGHRTRKKFFYGFQTGDMVKVVVPKGKYKGTWVGTVSCRNSGYFDIKDKTGKRIVQSISYKHCKIIQRFDGYCYELERIRISGTFPLQPVEVGASMCQ

SEQ ID NO: 2386 - protein, 471 aa, Caldicellulosiruptor bescii
MVIFTVDKHGRPGHPTRRFDMVRKLVKQGRAKIIGGGASGKPPVVMFLDREFDYSKTIERRLFVVLDPGYHHIGFAVCELRWGVLIVYCIGVLETRIPEIKDLMTKRRGYRRNRRYHSRCRKKRMSKRHSRVLTKFKAPRNVRTKDRTNATLRHGIETHLNLYKKLLKFFPFPAEQVVFVMEDNIFDVRTMTWGKTYGTGYQKSPRVPAEKKCIICGTEDNLQKHHLIQRKCGGTDVQENLVYLCRDCHEDVHAGRVYIPVEGVRQWRALGTMNAIIGQLREIPWLKFVPASDAAQMRKKLGLKKGHANDALATAAVFCSCTEADRTHMIELTLVKFRRHNRARIHAVRDRLYKVDGKIVAKNRRKRTDQKEPSFADISPLPPEIQRKLKVYPGTKILNPLRKEMPTIAGDVWIHEPTGKRFVTTGVVSQKYLYSPQLKKIVGKMYVQPEECRQVLHNEGMVVMYNSLYHS

SEQ ID NO: 2387 - protein, 452 aa, Streptosporangium roseum
MVFVLDTHGHPLDPCHPARARRLLAAGRAVVVRHTPFVIRLKDRTVAGSTMQGVELGIDPGSKHTGIAAFSERGGSRIGLYALQLDHRGGQIRDKLASRAALRRGRRSRNLRYRAPRFNNRTRPQGWIAPSLRHRVDGTVSWVSRLSRWAPVTAVHVERVAFDTHLLSAGRPLEGVEYRYGTLHGYEVREYLLAKWGRACAYCGASGVPLNLDHIHPRSRGGSNRISNLCVACVGCNQAKNATPIEEFLTDRPVVLVKILQQSKAPLRDAAAVNATRWALWRALTATGLPVATASGGRTKWNRSRTGAAKSHTLDALHVGALDHVTGWPSMVLVIAATGRGTYARTRADRYGFPRLALPRTKQHHGFQTGDLVRAVVPTGKKAGVHTGRVAVRSTGNFNIRTRHGSVRGISHRHVRLLQRADGYGYTTHPEARNRAAFPPPPEGGGIHAGGN

SEQ ID NO: 2388 - protein, 449 aa, Allochromatium vinosum
MAVFVLDKQKHPLMPCTEKRARLLLERGRAVVVRLAPFTIRLKDRIGGALQPLRLKLDPGSRVTGLALVRESETCDADTGAVERLEHGLWFGELAHRGQAIRETLGQRRHLRRARRSRKTRYRAARFLNRTRRTGWLPPSVQHRVESTVNWVKRLRRLAPITALSQELVRFDTQALQNPEISGVEYQQGELAGYEVREYLLEKWHRTCAYCSATGVPLEIEHIVPRSRGGSDRVSNLTLACRACNQRKGNQSIEDFLKRQPALLRQIQAQAQAPLQDAAAVNATRWALFAALKAQGLPVETGSGGRTKFNRSRLNLPKTHALDASCVGAVDQVRDWNRPVLAIRATGRGTYSRTRLDRFGFPRGYLIREKRVHGFQTGDWVRAEVPAGKRAGVHVGRVAVRRTGAFNIQTQDATVQGISYRHCRVLQRADGYGYAFQSKPDAEKARRAA

SEQ ID NO: 2389 - protein, 419 aa, Anoxybacillus amylolyticus
MFVYVINKHGNPLMPCSPRKARILLKNKKAKVVKRTPFTIQLLYGCSGYKQPISLGVDAGTKHVGLSATTKNQVLLEAEVQLRTDIQELLATRRQFRRSRRNRKTRYRKARFLNRKKPNGWLAPSIQHKMDSHIKLVKWVHSMLPITHITVEVAQFDTQKIKNPDIQGAAYQQGEQLGFWNVREYVLYRDGHTCQWCKGKSKDPVLNVHHMESRKTGGDSPSNLITLCKTCHDRIHREGLEHEIQRRFSSLKDASHMTAMRWFIWNGLKKVYPHVKHTYGYITKHTRIVHGLAKTHMVDARCISENPLATPSDTVFLLKFVRKNNRQLHKATISKGGKRKANKAERFIKGFQLFDKVLYNSQECFVFGRRSSGYFDLRLLDGTRIHASASYKKLKKVEHASTLLIERRKGDSSPTFALA

SEQ ID NO: 2390 - protein, 451 aa, Paraburkholderia hospita
MSAFVLDRNGRPLMPCSEKRARHLLARGRARVHRVMPFVIRLVDRMADSCALQPLRIKLDPGSKVTGVALVREADSGIAVINLFELIHRGRQISEALTARRGFRRRRRGANLRYRAPRFLNREKPEGWLPPSLQHRVDTTMAWVQRIRRWAPVTALSSELVRFDLQQLENPEISGLEYQQGTLAGYEVREYLLEKWKRTCIYCDAKDRPLQIEHLTARARQGSNRVGNLGLACGDCNQDKGALDVRAYVKDSKRLARILATASRPLRDAAAVNTTRWALTDTLRATGLPLELASGGRTKFNRVTHDLPKTHALDAVCVGRVDAINDWKRPSLSIKATGRGSYQRTRLTRHGFPRGYLMRQKQVQGFRTGDHVRADVPTGKRAGIHVGRVAVRATGSFNIQTASTVVQGINHRHCRLVQRGDGYAYSLQSTDSYQGDAGICGAAHAALSLPG

SEQ ID NO: 2391 - protein, 469 aa, Paraburkholderia hospita
MAVCVLDRSGKALMPCSEKRARLLLARGRARVHRVVPFIIRLVDRRAHASRFQPLRIKVDPGSRTTGLALVRDTQLVDATSGEIQRGAAVLNLFELVHRGRQISEALSARRAMRRRRRGNLRYRAPRFLNRTRPAGWLAPSLEHRVATTMAWVNRVMDWTPVAALSSELVRFDMQALENPEIASVEYQQGTLAGYEVREYLLAKWGRRCAYCDQEHVPLQIEHILARASGGTNRISNLTLACACCNAKKAARPIEAFLARDPKRLAVILAQAKRPLKDAAAVNATRWALANALRATGLPVELASGGCTQFNRKQLGLPKTHALDAVCVGKVASVSVWYKPTLAVKCTGRGSYQRTRLDRYGFPRGYLTRSRRVHGFQTGDLVRAEVPTGKKAGRHTGRVAVRATGSFNIQVAGNVVQGIAHRHCRLIQRSDGYGYSRIALLKGDASDGTASLSALSLPAVNDGVSRAAG

SEQ ID NO: 2392 - protein, 420 aa, Methanobrevibacter millerae
MFVYVLNMHGEPLMPCKPRKARILLKEKKAKVVNRTPFTIQLLYGSYGHKQPVNLGVDAGSKYVGLSATTTNKELFKATVELRRDIPKLLENRSILRRNRRTRKLRYRPPRFKNRGKKGKLAPSIQHKIDCHLTIIKRVCNIIPIQNIIVETAEFDTHKLKNPNVQGVEYQNGEGKDFYNVKQAVLSRDKYTCQICGKKQVKFEAHHIIPKSQGGSNRMENLTTLCSECHHKVHNGELKFNKKVTRFNHTSHMNIIRKRLMELLKKEFDNVHETFGYLTKYNREKLGIPKSHCNDAFIISHNPQAEQSSIEYLFKKVRRHNRQIHKAKPSKGGKRRKNQSHYIINDFRRYDKVMYNGIECFITGKRSNGYFQLKSFDGTVISQSTNSKKLKLLEPIKGWLVDWRWTIPPRPKEIKVSLPN

SEQ ID NO: 2393 - protein, 430 aa, Eubacterium oxidoreducens
MVYVLNQDGQPIMPTRNHAKVRVLLKNGKAKVINRCPFTIQLLYPCDNQTQSISLGVDAGSKHIGISATTKGDSTGARVLYEADVTLRNDIVELLSTRRENRRARRNRKIRYRKPRFDNRRRKDGWLAPSVQNKVNTHLTVVANACKILPVTKIVVETASFNLQKLKADLEGLKRPEGIEYQQGEQLGFWNIREYVLFRDGHTCQCCKGKSKDKILNVHHIQSRKTGGDAPNNLITLCETCHTGYHKGLVKLPESIKRNKPLKDATFMGIMRWAFYNKVKEIYVPQGIDVHMTYGYITKNTRIKNGLPKEHYIDARCISNYPEAIHPWNKTEVYYQKKVRCHNRQIHKMSIHKGGVRKLNQAEYLVKGYRLFDRVQYQGKEYFVFGRRKSGFFDIRTLDGEKVNKGSISYKKLKLLEISKGFLTERKVVA

SEQ ID NO: 2394 - protein, 456 aa, Fervidobacterium changbaicum
MVFVISKDGKPLMPTKRHGKVRRLLKQGLAKVVNREPFTIQLLYETTNYTQPVTVGIDIGSKVVGVCAVTDKEEMFSAEIQLRQDISKLLLERRQHRRFRRYRKTRYRKPRFLNRRKEDGWLPPSLQWKVDAHVRIVNKLSKIIPITKVVVEVAPFDIQKVLNPDIEGEDYQNGPQKGFSDVRDYCLWRAGYKSELSGKTGILEVHHIIPRSKGGTDAPSNLIVLTTQEHKMLHEGKIKIPKSRLEQIKVFKDAAHVSTIEQHIVNKLKQNYHVEITYGSITKERRDMYGLEKSHRDDAFVIAGGNIQERASEWYFGKFFRRQNRSLHKANPIKGGRRPINTVKQVNGFIRFDKVECEGEKAIITGLRSSGYFSISSLSGEKISDSVKYTKLRLIERAKTLMFERRERATCSWLKPRVSVARFHEIKTAHSRSFKRSTICFTMDNWFSYFYAYTAH

SEQ ID NO: 2395 - protein, 440 aa, Fervidobacterium changbaicum
MVFVLDKNKKPLMPCSEKRARLLLSRGRAVVHKMHPFTIRLKDRTVQQSELQPLRLKLDQGAKVTGLSVLREDGDVAETVFLCEIHHKTDIKQKLDARRAVRRSRRNRKTRYRKPRFLNRRRPEGWLPSSFKARADQLVNVVIKLTKLLPISAISIEDAKFDTQKLQNPEISGIEYQRGTLFGYEVREYLLEKWGRRCAYCGRSDVPLEIDHIVPRSRGGTDRVSNLTLACRECNQKKSNKTAAEFGYPHIEERARQTYKQAAFMNSIRSYLSKSLSSFGIPVEYGTGALTKANRIRLGFPKEHYFDACCVGESTPSEIRITQSYVQIWRAVGRGTRQMCNTDKFGFPRGHRQRCKKHFGFQTGDIVKAIVPRGKYAGIWMGMVAVRASGFFDIKDKNGKRVCQGIRYKYCKLIQTADGWQYSKTKTNYSISHTTEVACI

SEQ ID NO: 2396 - protein, 439 aa, Allochromatium warmingii
MSVFVLNKQKRPLMPCSEKRARLLLERGRAVVVRLVPFTIRLKDRIGGVLQPLRLKLDPGSKTTGIALVREVVRRDESVVWLAELTHRGYQISEALRARSAMRRRRRSANLRYRAPRFLNRTKPKGWLAPSLRHRVETTINWVKRLRRLAPITEITQELVRFDLQAMQHPEISGIEYQQGELAGYEVREYLLEKWQRTCAYCGAQQVPLQIEHIRPKSAGGSNRLSNLTLACAPCNHKKGAQSIEAFLKHKLELLKQIQAQAQAPLKDAAAVNTTRWALFNALKATGLQVKTGSGGQTKYNRQRLGIPKTHALDAACVGKLDALHNWQIPTLAIKAMGRGSYQRTRLNRFGFPRGHLMRHKRIHGFQTGDRVIAHIPSGKKAGVHVGRVAVRTSGSFNIQTATGVIQGIAHRHCSVLQRADGYGYSFNLTQPEEARLAA

SEQ ID NO: 2397 - protein, 424 aa, Caldicoprobacter faecalis
MVYVISKAGKPLMPTERHGKVRRLLKQGLAKVVKREPFTVQLLYDTTTYTQPVTVGLDIGSKTTGVSAVTEKKEIFSAEVELRDDIKGLLLERRQYRRMRRYRKVRYRKPRFLNRARDDGWLAPSLQWKVDAHIRIVDMLGRIMPIERVVVEVAPFDTQKILNPGIEGEDYQNGAQKGFWDVREYCLWRAGYRSELSGKRGILEVHHIVPRSEGGTDTPSNLIVLTADEHKGVHEGRIRIPKSKVEKVKMFKDAAHVSTIGWHIVNRLRERYSVEVTYGSTTKAKRLSCGMEKSHRVDAFIIAGGDLQERLREWYLGKFLRRQNRSLHKANPIKGGVRPVNTIKEAYGFRRYDRVEYEGIIGIIAGLRSSGYFAVRSLSGEKIHDSAKHNRLRLVEKAKTLMLERREERIPLHLEEDGVSCARI

SEQ ID NO: 2398 - protein, 447 aa, Halolactibacillus miurensis
MRVFVKSMRGFNLDPCKNQKARQLLKEKKAKIISYKPFTIQMLIATGETTHESHVGIDLGAKYTGVAITQEDRVLAKGDIECRQDIKALLETKKIYRRSRRSRKTRYRKCKCKHKTTRVYSNKKGKWVKKKTSFTSPRPKSWLPPSLESRTQNLFFWIDTFTSLLPKVKLHIEVGKFDVQKMKSPDIQGKAYQEGDTFGYHDVRYFVFARDHYTCQVCKKKGNILNTHHIIYRSHGGSDAPSNLISVCTDCHTSDNHKRGRILWHWMEKRKKVPTYKEPPFMNALRIRTFRRYPDARIIYGSETTPRRKELHLEKTHYNDAIAISGIQHIKENPHTIFYIKQFRKKKRSLHEATARKGRKNKNLTQKRNKKNTKEMKGIHLNDTVRIFGKIGFVSGFTTTGIYIKDIHNAYITKPGKTYKQVGFKDVTVENHNNNWQFISHLAPDGA

SEQ ID NO: 2399 - protein, 427 aa, Alicyclobacillus macrosporangiidus
MKQNRVLVLDKNHHPLMPCHPARARQLLKAGRASVFRWYPFTIILHDRDRGEVQSVRLKLDPGAKVTGIAVTAAFQRGDTVVWAAELHHRGDQIRQALLTRRALRHARRNRKTRYRKPRFDNRRRPEGWLPPSLVSRVENVVTWVERLRRFAPLTHLSMELVRFDTQKLQDPEIHGVEYQQGTLFGYEVREYLLEKWGRKCVYCGAEDVPLEVEHVVPRSRGGTDRVSNLTVACHECNQAKGNQSLEEFLHHDPERLRQIKAGLKTSLKGAAVVNATRWALFRRLQATGLPLEVGSGGRTKYNRAVQGYPKAHWIDAACVGELGERMRLHPEMQVTRIVAKGHGTRRRCGTDKHGFPIRHAPAAKSYMGFRTGDLVRATIPRGKNTGRHVGRIAIRHRPSFRLNGFDVHPKYLKILQRGDGYAYATE

SEQ ID NO: 2400 - protein, 501 aa, Desulfotomaculum thermosubterraneum
MVFVLDKHKKPLMPCTEKRARLLLERGRAVVHRMSPFTIRLKDRTAEESRFQPLRLKLDPGSRTTGFAVLREDTPNRSEVILLGEIHHKPSIKDGLDVRRNQRHSRRNRKTRYREPRFNNRHPEKCAVCGKNAQHGSRYCRPCEKAKNFVDNGHREGRLVPSLEARVNQTLSVVDKLTRWLPITAISTEHVKFDTQLMQNPDISGVEYQQGELFGYEVREYLLEKWGRKCAYCGKEGVPLEVEHVVPRNPKRGPRGTDRISNLTLACEECNKAKGNLQPEEWLEKLKQSKRKLDQVRAENLPKILRKLKEPLRDAALVNATRWVLYDRLKKTGLSVECGTGARTKYNRLKMGLPKTHYYDACCVGESTPENLAINQEYVQVWTALGRGTRKMCNTDKYGFPVSHRTRQKMYFGFTTGDLVMAEVPEGKYAGRWVGRVAVRASGYFDIKDGSGKRICQGISYRHIKLLQRADGWQYEKIRVEKGGSGGASSPGVNAGASGAA

SEQ ID NO: 2401 - protein, 415 aa, Fervidobacterium gondwanense
MVYAISQQGKPLVPTKRHGKVRRLLKQGLAKVVKREPFTIQLLYDTTTYVQPVTVGIDIGSKTVGVSAITDKKEVFSSEIELRTDIKDLLCERREYRQLRRYRKTRYRKARFLNRRKPEGWLAPSLRWKVDAHIRIVNMLSKILPISKVIVEVAPFDTQKILNPDIQGEEYQNGVQKGFWDVREYCLWRAGYKSEVSGKKGVLEVHHIVPRSGGGTDNPSNLIVLTAQEHKAIHEGRLKIPKSKIEKVRILKDASHVSTIGWHIVNELKELYEDVRVTYGSITKAKRSEFGLEKTHRNDAYVIGGGTVQKRAKEWYFGKFFRRQNRSLHKVNPIKGGIRPVNTIKQSYGFRRFDKIEYEGKIGIIAGTRSSGYFVIRSLSGERIHDSVKYSKLKHFEKSKTIMLERREAAISSHD

SEQ ID NO: 2402 - protein, 442 aa, Desulfobacterium vacuolatum
MHVFVKNMRGEALMPTSPRKARVLIAHGKAKIDSYRPFTIQLCIATGESRQDLTLGVDAGYATIGFSVIDSTKELFACEIELLKGQVERNNKRRIYRRQRRSRLRYRKARFEKQNKPEGWLAPSIQHKLDTHIKFIHRLQSIMPITETIIEVAAFDIQKIKANGEIEGKEYQEGEQLGFWNLREYILHRDNHKCQHLDCKNKAKSPILEVHHIGFWKKDRTNRPGNLITLCTKCHTAPRHKKNGSLYGWEPKVKTFKPATFMSMIRWKLVNALQCDHTYGHITKHNRIRLDLPKTHFNDAFCIANGQHQTRAIPVFFQQKRKNNRCLEKFYDAKVLDIRTNKIVSGNDLNNGRRTRNKNLNGENLRKYRGLKKSKGRRQVRRQRYSIRPHDIVEFDGSIYKAVGVQNKGTYLKITNGVKTVVKNIKHVKTIFHQKTLMYVSR

SEQ ID NO: 2403 - protein, 469 aa, Desulfobacter hydrogenophilus
MKVYVKSQSGKWLMPTNPANARILLKKGKARVIQRTPFAIQLLYETTEHIQPVTVGIDDGGIHVGIAAVSHGQSLFQQEVVLRSDIKSKLDTRRQYRRSRRHRKTRYRKPRFLNRKQSIPTCKVCGKNAPASKVICRACLRKAEGVHQKYAGIQKKAFRIPPSIKAKKEAIIRVVRQIPLPISNIILEDVYFDFQAMENPGISGKQYQHGDLLYHKNFKQACWVRDKFKCRVCGAESKLQCHHIKPRADGGTNKLSNLMTLCEGCHEKHHKDGLKLPKQKSAFYISAAHVQQGKNYLQAELSRIAPLRTTFGYITAHHRNKAGIEKSHVNDAVLIADKQASPLDRQIQTKHVQLRKRSLHEATARKGRKAPNRTQKRNKKNVFTLKGFNRWDTVQYKGRVGFISGFTGTSSCRIVDIKGNYIKNPEKKYTQVNLREVRKIHENRSIVSYYANSSPTFAIAQEGDSLAGS

SEQ ID NO: 2404 - protein, 470 aa, Paraburkholderia nodosa
MAVFVLDRRGRPLMPCTEKRARLLLARGRARVHRVMPFVIRLTDRKADACSFQPLRVKLDPGSRVTGIALVREADDGIAVLNLFELVHRGRQISEALTARRAFRRRRRGTNLRYRAPRFLNRSKPEGWLAPSLMHRVHTTMAWVNRIRRLAPVAALSSELIRFDMQALENPEVSGVGYQQGTLAGYEVREYLLEKWNRTCIYCDATDRPLQVEHLTARARNGSNRIGNLGLACGGCNQEKGSLNVREYVKDPKRLARILAAASRPLKDAAAVNATRRALADALRATGLPLELASGGRTKFNRVTHGIPKTHALDAVCAGCVNAVRDWQRPSLTIAATGRGSYQRTRLTRYGFPRGYLMRQKQVQGFQTGDHVRADVPHGKRAGVHTGRVAVRATGSFNIQTATAVVQGISHRHCTLIQRGDGYAYLQPKDSFRQEDAGDGRASHAALSLPGMNPGFLAQSDDFEIDFQGI

SEQ ID NO: 2405 - protein, 468 aa, Caballeronia glathei
MSVFVLDRRGRPLMPCSEKRAKLLLARGRARVHRVVPFVIRLIDRHVESCASQALRLKLDPGSRITGMALVRDTEIIVPATGEIQRGAAVLNLFELVHRGRQISETLTARRAMRRRRRGNLRYRAPRFLNRSRPAGWLAPSLQHRIDSTLAWVRRIQRWAPVTALSSELVRFDMQALENPEIRGIDYQQGTLAGYEAREYLLEKWGRQCAYCDTAGTPLQIEHIHAKARGGSNRVSNLTLACGACNRAKGASPVEVFLAKDSRRLARILARAKRPLKDAAAVNATRWVLSNVLKATGLPVELASGGRTKFNRMTLGLPKTHALDAVCVGEISFVTAWQKPTAQAKCTGRGSYQRTRLNRFGFPRGYLTREKQHFGFQTGDLVRASVPAGKKAGSYSGRVAVRASGSFNIQGAGGAVQGIAHRYCRLVQRSDGYAYSRIATSGRIAGAGTASRSALSLPAMNGGVSRAI

SEQ ID NO: 2406 - protein, 418 aa, Exiguobacterium antarcticum
MLVFVLNQHGEPLMPCKPRKARHLLDEKKAKIVKRTPFTIQLLYGASGYKQPISLGVDAGTKQIGFSATTSTKVLLEGEVQLRTDIQDLLATRRAMRNARRSRKTRYRQARFLNRKKPKGWLAPSIQHKVDAHLKLIRMIHRLLPIKHLTIEVAQFDIQKIKNPDISGDLYQKGDQLGFWNVREYVFFRDKHMCQHCKGKSKDNILNVHHIESRRTGGDSPDNLITLCETCHHKIHQQKLEHLFQRKSRSLRDASQMTVMRWFIYNAVKEAYPYVKLTYGFLTKNTRIQNGLEKRHAVDARCISGNPLGEAPKVSYLFRQVRANNRQLHKMTIGKKGKRKANKAERLVHGYQLFDKVQYEEQTCFVFGRRKNGYFDLRTIAGFSIHKSASYKKLTLLEKAKTWLVDIQPEGGEGRSQP

SEQ ID NO: 2407 - protein, 461 aa, Acidihalobacter prosperus; identical to SEQ ID NO: 2043

SEQ ID NO: 2408 - protein, 451 aa, Caldanaerobius polysaccharolyticus
MVFVLDKKKKPLMPCTEKRARKLLQSGRAVVHRLMPFVIRLKDRTAEESNFQPLRLKFDPGSKTTGFSLLREESAEKSAAIIMGEIHHKQGIKDRLDSRRVLRRGRRNHKTRYRKPRFDNRRREEGWLPPSLEARVEETVRAAEKLMKWLPITSISTEHVKFDTQLMQNPEISGIEYQQGELYGYEIREYLLEKYGRKCAYCGTENVPLQIEHVVPRNPKHGPKGTNRVSNLTISCERCNKDKGNKQPEEWLEELQKSKRKIDRVRAENLLKVLANLKKPLKDAAMMNATRWTLYERLKRTGLPVECGTGARTKKQRIEHGFPKAHYFDACCVGASTPKTIKIKTKYTEIWTAVGRGNRKMCNTDKYGFPISHRQRKKRHFGFQTGDIVEAEVLSGKYKGTWRGRVAVRASGYFDIKDSKGNRICQGISYRYVRLLQYVDGWQYEKEKVAY

SEQ ID NO: 2409 - protein, 477 aa, Azohydromonas australica
MSVFVLDRSKKPLMPCSEKRARKLLTAGRARVHRMYPFTIRLLDRTAEDSALQPLRLSIDPGSKATGLALCRVEDRVDADTGEAGEPALHIVALVELVHRGQAIRDSLRRRAMLRRSRRGRNTRYRAPRFDNRGGKRTGWLAPSLLHRVETTLTWVRRLRRWAPVSELAQELVRFDMQLMQARAAGKGIEGVEYQRGELAGFEVGEYLLAKWGRRCAYCDAEGVPLEKDHIVARARGGSDRVSNLALACRPCNRAKGAQDVGEFLAHAPARLARILAHAKAPLKDAAAVNATRWRLFNDLKSTGLPLQTASGGRTKFNRTRLALPKTHVLDAACVGRVGEVLRTAQPTLQVQCNGRGSRSRTRLDAHGFPRGYLMREKSVLGFRTGDMVHATVPASSRKAGTWVGRVAVRSSGSFNVQTAAGTVQGINHRHCRVLMRGDGYGYQLVAQHRKESGYRDGASRRALSLFGLKAEVSRAV

SEQ ID NO: 2410 - protein, 427 aa, Enterococcus cecorum
MVYVLSIDNEPLMPCSNVIARLLLKQGKAKVKYREPFTIKLTYETTTYTQPLTLGVDTGSQTFATAVADEKGNILYTSEVTLREDKNNSIKKKMDQRRMYRRNRRSCKTRYRKARFNNRKNSKRKERFSPTMTSKLHSHQKEIEFIKSILPIAKLIFETGTFDPHLMKNPSLANPKVKPWGYQQGPNYGFENTKARVLVRDNHTCQICNKKPKNERLEVHHIVFRSQGGSDEENNLVTLCHSCHVELHKGLIHPNFEGSLKSALKYATQMNSIRIQLLKLYPDAIETFGYVTKANRLNLGLPKEHYVDAAVIATAGNQVKFACNLMIKRCIPKGDFQRTKGVRSEKTIPKGKIDGFKKYDKVRYFGNEYFIKGRRTSGYFTLMDIYGQTISFNHMSKGQKTPKAKNCHRISARKSWIVTTKKLENIA

SEQ ID NO: 2411 - protein, 419 aa, Bacillus humi
MVYVLNIDGKPLMPCSSVIARLLLKQGKAKVKRRTPFTIQLFYKTDTEYIQPLTHGLDSGSSKVGSAVSDEKGNIVYMSQVEIRNDVSKKMQQRSKYRRNRRNRKTRYRKARWLNRKNSMKKDRFSPTMTSKIHAHMRETRFVQKVLPISKTIIETATFDPHALKNPAVLTNKWLYQTGINYRYANTKAYVLTRDGYCCRHCKGKTKDKRLEVHHIIFRSENGSDEEDNLITLCKTCHDALHQGKVALKKKGKKKGQLNHATQMNSIRIQLLKRIHAEETFGFVTKEHRQLMGLSKEHYFDAVAIATQGKEPTFKMSNVLFKKCVSDGDYQQTKGVRSEQVIPTGKLFGFRKFDKVQYIGNDYFIKGRMSSGYAILMDIEGNKVDLKPIPKFSKMQRVSARKSWIMIPKTIPSFYSYVT

SEQ ID NO: 2412 - protein, 447 aa, Micromonospora viridifaciens
MVFVVDRHHRPLQPCSPARARKLLASGRAVVHRHTPFVIRLKDRETADSQVDGVELGVDPGSKFTGIAVFRTDNDVRTGLFAIEVRHRGGRVRDKLAARSAFRRGRRSRNLRYRAPRFLNRRKPDGWLAPSLRHRVDNTMSWVQRLCRWAPVTGVHVERVAFDTQLMQNPNIGGVEYQHGTLHGYEVREYLLAKWGRKCAYCGVAGVPLNIDHIVARSRGGSDRVSNLTLACVPCNQAKDATPVDVFLADRPTVLARIRRQAKLPLRDAAAVSTTRRALWQALAATGLPVEVGTGGRTKWNRHQTGAPKTHTLDALHVGTITAVRSCPGHIMVATATGRGCYARTRCDRYGFPRLRMPRSKTVYGFQTGDLVRAVVPAGQNKGRHVGRVAVRTTGKFNIRTSHALVQGIHHRHFRLLQRADGWAYTREEERRFIPALNGQVSTPQRR

SEQ ID NO: 2413 - protein, 450 aa, Micromonospora siamensis
MVFVLDRHHRPLQPTTPARARKLLTSGRAVVHRHTPFVIRLKDREVASSEVDGVEVGIDPGSRFTGIAVFLAETAGDNLVRTGLFGIEVRHRGNQIRDRLFARAALRRARRSRKLRYRAPRYANRRRPHGWLAPSLRHRVDNTMSWIERLRRWTPVKLLHVERVAFDTQLMQEPDISGVEYQHGTLHGYEVREYLLARRGRKCVYCGAVGVPLNIDHVVPRSRGGSDRVSNLTLACVPCNQAKGATPIDTFLADQPAVLARIRRQQKLPLRDTAAVSATRWALWRALVATGLSVQVATGGRTKWNRHRTDVPKSHTLDALHVGVLTTVRSYPGQVLVATATGRGRYARTRADRYGFPRLRLPRIKTVCGFQTGDLVRAVVPTGKNIGKREGRVAVRTSGRFAIRTGQTLIQSVHHRYVHLLQRADGWAYTREEERRFDPVVTDRVPTPHT

SEQ ID NO: 2414 - protein, 430 aa, Clostridium magnum
MRVYVKNQRNQPLMPTTQRKARIFLKQKKAKIITYEPFTIQLLYATGETTQETILGVDAGNRTIGLSATTYKCELFSAELKLRTDIVELLATKRQFRRSRRSRKTRYRQPRFENRKKTEGWLAPSIENKIGTHLKVVNKVHSLLPISKIIIEVASFDIQKIKNPDIQGEKYQQGNQLGFWNVREYVIFRDGHKCQGKKNCKGKILNVHHIESRKTGGDSPDNLITLCEDCHKDYHSGKLKLNLKRGQSFRDAAFMGIMRWSFYNKLKELYSNVNLTYGYITKNTRITNNLPKEHRIDALCITGNSTVKRLDNWYLIKQVRKKKRSLHEAIARKGRKEPNITSKRNSKNTKEIISKGKKWCLFDKVKIGSNTGFVSGFTGNMVYVQDIEGNYLQVSPKYKQISTDNVSLISRNNNWIYKEVALGTANHPHL

SEQ ID NO: 2415 - protein, 423 aa, Clostridium magnum
MRVYVINQRKEPLMPTSQRKARVLLKQGKAKIHSYNPFTIQLLSSTGETKQDITLGVDAGSKTIGISATTKKVELYSAELELRTDIVELLSTKKQYRRSRRNRKTRYRKSRFLNRVKSKNKGWLAPSIENKIQGHFRIIEKVNQLLPISETIVEVASFNIQKINNPTIQGKEYQQGNQLDFWNVREYVLFRDGHKCQGKKNCKGKILNVHHIESRKVGGNAPANLITLCEDCHNDYHSGKLNKTFKRGKSFKDSTFMGIMRWTFYNRLKEIYPNVKMTYGYITKTIRITNKLEKAHRIDARCISGNSLAKESDVWYHVKQVRKKKRSLHEAVARKGRKTPNRQSKRNSKNTKEIIYKEKKWCLYDKVKVNGGIGFISGFSGNMVYVQDIDGKYIQLSPKYKQISTDNIELINRNNNYICECIA

SEQ ID NO: 2416 - protein, 442 aa, Macromonas bipunctata
MAVLVLDRSGKPLMPCSEKRARLLLERGRARVHRVVPMVIRLVDRQVADCTLQPVRVKLDPGSKTTGLALVRDAERIDVTTGEIQREAAVLNLMELVHRGRQISEALSARSRMRRCRRGNLRYRAPRFLNRRKPQGWLPPSLRHRVDTTVAWVERLRRWTPVVAISSELVRFNMQALANSEIAGVEYQQGTLAGYEVREYLLEKWGRKCAYCCATEVPLQVEHIQPKARGGTNRISNLTLACRPCNERKAARPVQEFLAKEPQRLASVLAQAKRPLKDAAAVNTTRWALANALKDTGLPVELASGGQTKYNRVRLGLQKTHALDAVCVGVVGTTVTHSQQPTLTITCTGRGSYQRTRLDQYGFPRGYLMRTKRVKGFGTGDMVRAHVTSGKKVGNYVGRVAVRASGSFNIRTSGELVQGISHKYCHLVQRADGYGYFFNYRA

SEQ ID NO: 2417 - protein, 441 aa, Macromonas bipunctata
MSVFVLDRCGKPLMPCSEKRARLLLERGRARVHRVVPMVIRLVDRQVANCKLQPVRVKVDPGSKTTGLALVRDMESTDSVTGEIYRQVAVLNLMELVHRGRQISEALSARSSMRRRRRGNLRYRAPRFLNRSKPQGWLPPSLQHRVDTTMAWVKRLQCWAPVVAISSELVRFDTQALDNPEISGAEYQQGTLQGYEVREYLLEKWGRKCAYCDATEVPLQIEHIHPKARGGTNRVSNLTLACAPCNQRKAAQPLQNFLATEPQRLARITAQAQRPLKDAAAVNATRWALANALKCTGLPLELASGGQTKYNRVRLGLEKTHALDAVCVGHVDAATYGLQPTLAIKCTGRGSYQRTRLDKYGFPRGYLMRTKRVKGFGTGDMVKACVLTGKKVGTYTGRVAVRASGSFNIRTSTELVQGISYKHCQLVQRADGYGYFFHYRA

SEQ ID NO: 2418 - protein, 436 aa, Nonomuraea polychroma
MVFALASDGTPLDPCHPARARRLLKAGRAVVARHTPFAIRLKDRSAEQSEIQGVEVSLDPGSRHTGMSLFRAHDGTRYGLFGIRLDHRGGKIRDKLAARTAYRRRRRTANLRYRAPRFANRTRPDGWLPPSLRHRVDTVISWVQRLRRLAPIRALHVETVRFDTHALPAGRPLEGTGYQHGTLHGYETREYLLTKWGRACAYCGTTGTPLNIDHIQPRSRGGSDRISNLTVACMPCNQAKNNMPVTDFLAGRPAVLARILAQAKAPLRDAAAVNTTRWALYTALTATGLPVRCGSGGRTKWNRHRTGAPKSHTLDALHVADLDRVASWPGRVLVIAATGRGSYCRTATDRFGFPRLRLPRTKQIFGYQTGDLVRAIIRKGKHPGSHTGRVVIRTSGSHTVQTASGPIKTSHKHLRLLQRANGYAYTTKKEEHRCAS

SEQ ID NO: 2419 - protein, 446 aa, Paracandidimonas soli
MAVYVLDKQGRALMPCSEKRARLLLARGRARVHRLTPFVIRLVDRLRIDSDVQPLTLKLDPGSRFTGMALVRQQAQRLSVLSLFELLHRGAAISKALGQRAGFRRRRRSANLRHRAPRFDNRTKPSGWLPPSLRHRLDTTLGWVTRLRRWAPITDLAVERVKFDMQVMQNPEISGVEYQQGELAGYEVREYLLEKWGRCCAYCGTENTPLEIEHIIARGNGGSNRVSNLTLACRSCNQRKGSQPVERFLKNKPQVLARIKVRAKAPLRDAAAVNATRNALLGALLHTGLALATGTGAQTKYNRRRLGIPKAHTLDAVCVGDVQAVKGWQRPTLTIKATGRGDYQRTRLTASGFPRGYLTRQKQHFGFQTGDQVLANVPAGKKAGMHRGRVAVRKTGSFNIRTPDGVIQGISHRHCRIIQRADGYAYTQSRFDSAQLEQEAARTGAH

SEQ ID NO: 2420 - protein, 439 aa, Actinomadura darangshiensis
MVFVLDKHGMPLQPCHPARARYLLRRGRAVVHRHTPFVIRLKDREIAGSEVDGVEVGIDPGSKHTGVSVFTAQTGERRARFAVQLNHRGATIGKRMRQRAAYRRRRRSANLRYRKARFSNRTRPQGWLAPSLRHRADTTTSWVDRLTRWAPVQAVHVERASFDTHLLAAGKPLEGTEYQHGTLHGFEVREYLLTKWGRACAYCGATGTPLNIDHIRPSSRSGSDRVSNLTLACIPCNQVKSNRLVTEFLAGRPDVLAKVLAQATKPLADAAAVNSTRWALWRALDARLPTHTATGGRTKWNRTCNGLPKSHALDALAVGTLDSITETVRRVLVVGCAGRGAHQRTTPNQHGFPRLTRPRKKTFYTFATGDLVRAVVPTGKKAGTHTGRIAVRERGYFDIHTRHGRVAGIGHRHVRLLQRADGYAYTTQLEVTPEHHKDG

SEQ ID NO: 2421 - protein, 447 aa, Actinomadura darangshiensis
MVFVLDGQGVPLQPCHPARARRLLASGRAVVARHTPFVIRLKDRLAAESQVDGVQVGIDPGSRHTGISVFTSQEGERRGRYSIQLDHRGAQIHKRVGQRAAYRRRRRSAKLRYRAPRFLNRQRPDGWLAPSLGHRVDTTVSWADRLTRWAPVRVLHVERVAFDTHLLSAGRPLEGTEYQQGTLCGYQAREYLLEKWGRVCVYCGAVDVPLNVDHIHPRSEGGSDRISNLTLACVPCNRAKGDQPVQRFLARRPAVLARILAQAKTPLRDAAAINATRWRLWRALDSRFPGQVRIGSGARTKWNRTQSGLPKSHTFDALCVGGSDAVTVTAYPADVLVIACTGRGTHCRTSPDKYGFPRLRLPRSKNVHGFQTGDLVKAIVPAGKKAGSHLGRVAVRTTGWFDITGGRGTVQGISHRHVRLLQRGDGYGYTIRPENTVPMYGPKEGIR

SEQ ID NO: 2422 - protein, 459 aa, Branchiibius hedensis
MVFVLDRHKRPLMPTDCKRAKKLLARGRAVVHRKVPFTIRLKDRTVDQSMLEPLGLGIDPGSQHTGLSLDKTVEAVDESTGEVTTTRTGLWLGQLDHRGQHIHLRLVARAQRRRGRRGRNLRHRAARNRNRSVRVGWLPPSVQHRVDSTMTCVTRLQSLAPIASLRLERVSFDTHAMTAPGISGLEYQQGTLAGTEIREYLLAKFCHRCVYCDATGVGTGSVPLNIDHLLPRARGGTNRVSNLVLACVRCNQAKGARSVDAFVTDGVRRARIKAEAKTPLRDAAAMNACRNRLAAELDATGLPVEWASGGRTKWNRVRNGVPKDHSLDALCVGAVDVIVRWVPTVLHIQCVGRGRYQRVTTDRFGFPRSHRPRRKQHYGFITGDLVKAVIPTGPKAGVYRGRVIVRSTRTFRLVTPTHRYDGINCRYMTTMQRGDGYSYKARPSLQRRLAPHGDQTKAA

SEQ ID NO: 2423 - protein, 446 aa, Pseudomonas rhodesiae
MAVYVLDKTGTPLMPCSEKRARLLLERGRARIHRQVPFVIRLVDRRQADSALQSLTLKFDPGSKFTGIALVRQKGQRVSVLSLMELAHRGAAIRQAMQQRAAFRRRRRGQNLRHRAPRFDNRTRPEGWLPPSLRHRLDTTLGWVGRMRNWAPISDLAVERVKFDMQAIQNPEISGVQYQQGELAGYEVREYLLEKWGRCCAYCDAENTPLEIEHIVPRSAGGSDRVPNLTLACRPCNQRKGNQPVEVFLKARPELLARIKAKAKAPLRDAAAVNATRNALFRGLLDTGLSVTTGTGAQTKYNRRRLDLPKTHALDAACVGEIRAIEHWHRPTLAIKATGRGDYQRTRLTTHGFPRGYLTRQKRHFGFQTGDQVRAEVPTGKKAGTHLGRVAVRKTGSFNIQTSDGVVQGVHHRHFTLIQRADGYAYSHIQTDSPQSQKEAARAEVR

SEQ ID NO: 2424 - protein, 451 aa, Ruminococcus sp.
MSVAVISKTGERLMPTSEYRARKLLKSGKAVKHSYHPFTIQLTERKTGDVQPIELCMDTGYIHIGISVKSEKHEYLAEQIDTLTDERIRHDACRMYRRQRRGRKRYRKPRFNNRKRDKGWIAPSLKHKKDIHVQAISRINKVMPLTDITMEMGNFDTQVLKAKEEGKPLPQGACYQHGERYGTATLREAVFSRDGYKCQCCGRTIRDGAMLHVHHVKYRSQGGTNSMANLATVCDKCHTPKNHKPGGKLYNWKPKLPDFKGATFMTTIRWQLYNEVKSLFPDINVHITYGAATKEQRRELNIDKSHVNDAFAMGKFHPKHRANAVLYKKKRRNNRCLEKFYDAKYIDSRDGSKKTGQELFNGRINRNHKKDSENLHQYRLQKIKAGKRTIRKQHYSIQPHDIIMYKNRKRETSGCHCNGTRVVLLPDKKTAAIQKVKIYKYAGGYFKSAFN

SEQ ID NO: 2425 - protein, 418 aa, Bacteroides dorei
MVYVINKQGQALMPTERFGKVRRLLKNGLAHVVCRIPFTIQLDYDTTDYTQPISLGVDAGSKHIGISATTSEKELYAADVELRNDIVDKLSTRREQRRTRRSRLRYRKARFNNRISSKRKGWLAPSVENKIQTHLTVVEKIHKFLPITNIVVETASFDIQKIKNPSISNEEYQQGEQLDFFNVREYILFRDGHTCQHCKGKSKDKVLNVHHIESRKTGGDSPNNLITLCETCHKAYHRGEFELNVKRGKSFRDAAFMGIMRWNLYDRLKHIYPNVSMTFGYITKNTRITNNLPKEHYVDARCISGNPVAKPLGYYFYQKKVRCQNRQIHKVNFLKGGRKKLNQAPFLVKGFRLFDLVEYQKDLYYIFGRRDSGFFDIRKLDGTKVNKGSISCKHLRLIDKRKSILTERRNSGSIPPTN

SEQ ID NO: 2426 - protein, 431 aa, Eubacterium sp.
MVYVLDINGQPLMPTTRHGKVRRLLNGHLAKVVKRCPFTIQLLYQSTKETQSTSLGVDAGSKHIGLAATTEKKVVYQEEFTPRNDVVKLLSARRILPHSRRNRKTRYRKPRFNNRVHSKHKGWLAPSVEIKIQEHITAIKRICQILPISEIHVETAEFDLQRLKALEDGNPLPVGTDYQLGEQYDFYNTRQYVLHRDGYTCQCCGTHDNNVKLHVHHIESRQTGGNAPNNLITLCEHCHSALHEGKLKLPKGKKRGKSYRDTAFMGIMRKTLLERLRKEIDIPVTETYGYITKYWREKVGLEKGHINDAVCISKHPYAEPLDIYYLTKAVRHHNRQIHKTKFSKGGIRKRNQAPYLVKGFRLFDKVLYQNREYFIFGRRATGYFDIRTLDGTKVNKGSISYKKLRIQDTANAYLKEVKAIPHMNKFTCVLA

SEQ ID NO: 2427 - protein, 413 aa, uncultured Clostridium sp.
MVYVIDKQGNPLMPMERYGKVRRMLKSGRARVYSRTPFVIQLCYDIKEPKCQEVVLGVDAGHKELALSGCSSAQELYAAKVMLRTDVPKLMEAKKNFKRRRKINRRYRAKRSQNRKRNSEHGWAAPSVKVKVDEIIQAILRVKQILPVTEVRMEIAEFNYPQIRQYIYDGIAIPHELDLYDVRQYMLWNSYHTCESCKGREDTKKLIVVGQEAKDMVVLCANCYLRYEAGKKKLPKPKMRKSPADIPEFGMVRKYLRRRIYSAIDPSEIVEVYGYQTKIRREKFKLPYSKLNNAFAIAASTESQSSSDKVYCYKILRRHNRMLHNATVLKGGTRKLHQAPYIVKGFRLWDKVLFENQECFVAGRRKTGYFLLKDIKGNIVHTAASYKRIRLLEMSKGYIVAEYSRKESMFGAE

SEQ ID NO: 2428 - protein, 446 aa, Pseudomonas aeruginosa
MAVYVLDKTGTPLMPCSEKRARLLLERGRARIHRQVPFVIRLVDRRQADSALQSLTLKFDPGSKFTGIALVRQKGQRVSVLSLMELAHRGAAIRQAMQQRAAFRRRRRGQNLRHRTPRFDNRTRPEGWLPPSLRHRLDTTLGWVGRMRNWAPISDLAVERVKFDMQAIQNPEISGVKYQQGELAGYEVREYLLEKWGRCCAYCNAENTPLEIEHIVPRSAGGSDRVPNLTLACRPCNQRKGNQPVEVFLKARSELLARIKAKAKVPLRDAAAVNATRNALFRALLDTGLSVTTGTGAQTKFNRRCLGLPKTHALDAASVGEIRAIEHWQRPTLAIKATGRGEYQRTRLTAHGFPRGYLTRQKRHFGFQTGDQVRAEVPTGKKAGTHQGRVAVRKTGSFNIQTPDGVVQGIHHRHCTLIQRADGYAYSDTPTDSAQPQKEAARAGAR

SEQ ID NO: 2429 - protein, 425 aa, uncultured Clostridium sp.
MVYVLNKNGQSLMPTNRHGKVKHLLKDGKAKVVKRCPFTIKLTYETTNYTQDLTLGVDTGSGTIGTAVSKDSGDIIYMSEIVVRNDITNKMSQRAKYRRNRRNRKTRYRQARWLNRRNSIRKDRFSPTMQSKLHSHVKEIEYIKSILPITTMVFETGQFDMHLMKNPMLANPKVKHWGYQKGTNYGFENTKAMVLNRDNYTCQYCKGKHKDSKLEVHHIIFRSQGGSDEDSNLITLCHTCHKNLHDGKIAPNFKGKAKGTLKYATQMNSIRKQLFRLYPEVIETFGYVTKANRLAIGIEKEHYYDACTIATQGKPFIVKTNLYKKKCISDGDFQKTKGIRSEQPIVTDKIYGFRKFDKVKYFGKEYFIKGRMSTGYAILMDIEGNKADFSTMPKGFKTPKMINLKRLEARSSWMVTIVEVTPNIA

SEQ ID NO: 2430 - protein, 424 aa, Ruminococcus sp.
MVYVLSKDGKPLMPCSNVIARLLLKQGKAKVRKRQPFTVKLNYETTNYTQNLTLGVDTGSGTFGTAVTRDNGEIVYLSEVTVRNDITDKMTQRAMYRRNRRSRKTRYRKARFLNRRNSIREGRFSPTMQSKLHSHVKEIEWIRSILPVRTMVFEAGQFDTHLMKNPAFADPKTRLWGYQKGPNYGYANTKAMVLNRDGYTCQYCHGKRKNSRLEVHHIQYRHMGGSDDSDNLITLCRSCHKDVHDGKITLPNVGKKKGTLKYATQMNSIRKQLSLAYPEAAETYGYVTKENAQLLGIEKRHCLDACVIATQGQPFTVKSLLYRKKCIPKGDFQQTKGVRSEQPVATGKIGGFQKFDKVRYLGKEYFIKGRMSSGYAILMDFEGKKADFSHMPRGQKTPKLSRMQRLETRSSWMTTAEAGIQNTA

SEQ ID NO: 2431 - protein, 415 aa, Bacillus cereus
MRVFVKNLRGEPLMPCSNRKARLLLKQGKAKIIGYTPFTIQLQYATGETVQSVAIGVDSGSKYVGIAITTEDKVLAKGTIELRQDVKENLTLRATLRRSRRQRKTRYRKARFLNRKKREGWLPPSIQSRMHNQIHWIEIFRSLLPSPKVIVEVGKFDAQKLKNSDIQGKEYQQGDAFGFWNTRYYVFTRDHYTCQICKKKGGILHTHHIIERCSGGSDMADNLVTVHEECHQKFHQGTIKHIFKKPKQYKETAFMNILRLQIMNRLGCEITYGSYTTPKRKELRLSKTHYNDAIAITTPTKLQEYEQSGEFRIKQFRKKKRSLHESTARKGRKTKNTTAKRNNKNTPKVHGIYLGDKVKVFGQVGFVTGFTGKMMYVQDIDGHYLQNPSKSYKQVKISDIECIHHNNNWLFLQIS

SEQ ID NO: 2432 - protein, 434 aa, Escherichia coli
MAVFVLDHHKKPLMPCSEKRARLLLERGRARVHRRVPFVIRLVDRKQPDCALQPLRLKIDAGSKVTGMALVQDKENSTVSAINLFELAHRGHAIRDALTARRAMRRRRRGNLRYRSPRFLNRKKDNGWLAPSLRHRIDTTMSWVNRFRRWTPLAAISSELVRFDMQSMTDSDIQGAEYQQGTLFGYEVREYLLEKWQRKCAYCDAVNTPLNIDHMEPRSRGGSNRVSNLVLSCIPCNQNKGVQSVTEFVKDKARLTRILAQIKRPLQDAAAVNATRWALANALKATGLPVELASGAKTKYNRTRLGLPKTHALDASCVGQVGYITRWERPVLRIKCTGRGSYQRTRLDKFGFPRGYLLRQKQVNGFQTGDMVRATVPESSKKAGCYTRRVAVRASGSFNIQTGDSVIQGISHKYCQLLQRADGFGYQLTKIAIN

SEQ ID NO: 2433 - protein, 470 aa, Ruminococcus sp.
MSVFVVGLNGCRLMPVSERKARLLLKGGKASVYRKVPFTIKLNYKTGSTVQPGYLGIDTGSQHIGVSVVQKDGTILHKEEIRLRDSMSKRKLLESRASSRRGRRYRKTRYRHPKWKPKTKRIYNEKADRKGRHWKKQKNTFTSKRQAGWLPPSLQSKTDHHIQWIRKLLDLLPEGYRLSIELGRFDPARMRDPEIHGELYQKGPQYDYENVRAYVLARDGYTCRVCKKKGGKLHVHHILYRSRGASDNPKYMAAVCSKCHTTENHLPGGILYQWMQDQKKFTRGLRDATFMNILKKRLRKAFPDAVFTYGNITKADREKLELPKSHGNDATAIALVKTEVKSVKDEEPVIHIQQVRRKKRSLHEETPRKGRKEPNRTASRSDKNTKSVTVAKGSGEKKASMTACLFDRVELDGKKGWITGFTGTSCYVKDKEDNYICTSSKYKQVSISRLRILHHCGNWAIGAEKPLGKG

SEQ ID NO: 2434 - protein, 457 aa, Ralstonia pickettii
MAVFVLDRHSRPLMPCSEKRARLLLERRRARVHRLMPFTIRLTDRRLNDCELQPLRLKLDPGSKETGVAIVRETIHDTDGTRTAIVLSLAEIVHRGRQISEALTARRSMRRARRGRKTRYRAPRFDNRSKPKGWLAPSLRHRVDTTAAWVRRFIELAPITALSMELVRFDMQAVENPEISGVEYQQGTLLGYEVKEYLLEKFGRICAYCDAPDRPLETEHIVAKANGGSNRISNLTLACRPCNEKKGKLPLEIFLCKDPERAKRILARAKAPLRDAAAVNATRFALLDALNSCGLSVETGSGGQTKYNRRRLEIPKSHALDAACVGEVHAVLDWQRSVLRIKCTGRGSYQRTRLTAHGFPRGYLMRNKRAFGFQTGDMVKAIVPTGKKTGTYVGRVAIRATGSFNIQTAAGAVQGISHKHCKVIQRGDGYGYQFVAQTTKESEKGATPRVAHYPSPA

SEQ ID NO: 2435 - protein, 431 aa, Klebsiella pneumoniae
MNRVFVLSKTGKTLMPCHPARARQLLHDKKAVIKRLYPFTIQLTHRSEEYIQPVELKFDPGSKQTGIGIVLHGKNRLSAIYGAVLTHRGNEIKNNLDSRRMIRRSRRNRKTRYRQVRFLNRVRSKHKGWLAPSVQSRVDNIVEWSKRFIRYVTVGFITVESVKFDMQKMENADVDGIEYQRGTLFDYEVKEYLLEKYNYSCVYCGAKNVPFEKEHVIPRSRGGSNRISNLVLSCRSCNEKKDNLPIEEYLKDNPALLKKIKAQLKSSLKDAAAVNITRKQIVKELENLNVPVLTGTGAETKYNRVSQGYKKEHYIDALCAGTTGTKVYIPSTLKPLLIKKERRNNRQMCLVDKYGFPRGKAKGSKIVHGFKTGDIVKAVVLKGKKKGTYKGKVAVRSSGSFNIKVKQGVVEGIGWKNCVMLYRFDGYSYAY

SEQ ID NO: 2436 - protein, 451 aa, Ruminococcus sp.
MSVAVISKTGERLMPTSEYRTRKLLKSGKAIKYSYHPFTIQLTERKTGNIQPIELCMDTGYIHIGISVKSEKHEYLTEQIDTLTDERSRHNARRMYRSQRRNRKRYRQPRFNNRKKDKGWIAPSLEHKKNIHVQAISRINNVMPLTDITMEMGNFDTQVLKAKEEGRPLPQGVDYQHGERYSIATLREAVFARDGYKCQCCGRTIKDGAILHVHHIKYRSQGGTNSISNLATVCDKCHTPKNHKPGGKLYGWKPKLPSFKGATFMTTIRWQLYNEAKALFPDIDIHITYGAATKERRRELNIDKSHINDAFVMGQFHPRHRIKAVLYKKKRRNNRCLEKFYDAKYIDSRDGKKRSGQELFNGRINRNHKKDSENLHQYRLQKVTAGKRTVRKQHYSVQPHDIIIYESRKRETTGCHCNGARVMLLPDKKSVSIKKIKIYRYAGGYFKSTFN

SEQ ID NO: 2437 - protein, 450 aa, Clostridioides difficile
MVYVINFEGKPLMPTTNAKARKLLKQKKATVKRVNPFIIQLLYKTDTEYIQTITLGIDSGYLNIGFSAITDSKELIVGEVKLLQGMKDRLLEKSQYRRIRRQRLRYRKPRWNNRKIKQGWLAPSLQHKLNTHLKFIDYLNSILPIRNIVIEVANFDIQKIKNPDISGVEYQQGEQMSFWNVREYVLHRDGHKCQNPNCKNKSKEQILEIHHIKYKSEGGSDAPSNLITLCNKCHTSPNHKKGKFLYDWCENGKKVRGFRDATFMSMIRWYLLEQLKEKYTNIKATYGYLTKNHRIEHGIEKSHFNDAFAIAKGVNQVRNLEIFKVEQSRLNNRSLEKFYDAKYIDNRTGEKVSASELNCGRRTRNKNLNSENLRVFRGQKISKGQRRIRKQKSLYQPNDLIKYDRNVYTVKGSQNEGKYIALKEIKKVPNVKLIKPYIFKKGLNWSHGLY

SEQ ID NO: 2438 - protein, 415 aa, Ruminococcus sp.
MENRIEYCFVVDKNNRPLTPTKVNKGWYLVRKSRAKLKSKYPMVIQLEKEVKSDEDDESHIVCGIDDGSAHVGLAIVQKCPTKNKVVFKGTIEQRQDVKHLMDVRRGHRRYHRYHKRYRQARFNNRSSSKRTCRLAPSIKQKKDAILRVLYQLNKWVNIQEYHLEDVCIDIRALTDDYKPYRWQYQKSNRLDENLRKATILRDECRCQEFGKSNCVLEVHHIRARKYGGADTIGNLITLCSGCHQKTEGRERDFEDRYFNMIKSKPKRFDYAMHVMQGKTYLREKISELGSLHLTNGGETANKRIEWNMEKSHGNDAICVTDCIPDNCDVKEWIIKPMRRKSKAKTNNLLGIRHRDLVSYTYKNGETHTGYVTALYPEQLVLNFQSKTKHCKKVNARKCRLLWKFNKIYWLEQCV

SEQ ID NO: 2439 - protein, 439 aa, Arcobacter butzleri
MVFVIDKQKNQLLPTTNAKARILLNANKAVIHKIYPFVIRLKTSKTINANNKCAIKLDPGANTTGVAIVDKEKCLFLMEIIHRGKEIRKALFQRKVVRRNRRQRNTRYRQARFQNRIKRNGWLAPSVKSRADNIINIVNKLSKYIPLTNVAIENVSFNTTDMTEGIKLYGKEYQNGNLKDTKLRKFLMEKYNNRCNYCGSIEKLEVEHILSKSKGGTDSIKNLTLSCRKCNELKNNLSLKQFGKLINRDLSHLEPLQTPKSAAIIQSARNYTIAQLAKSFEIETGEGWETSFNRKEVNLPKEHYYDALCVGKDYDYRIVANTVLVIKARGRGSRQMCLMDKYGFPRTSPKSSKSVKGFQTGDIIKAKVPDGKKQGKYFGKVAVRTNGYFNITTDTQTIQGIGHKHCKVIQRGDGYAYFMKGASGFLSGLEDRVSTAILR

SEQ ID NO: 2440 - protein, 460 aa, Mycolicibacterium conceptionense
MNSPRIHRTFPSGRCSFSTSAASRSCLATPARARQLLGKGRARVHKLYPFTIRLTDRLAETSEIDGMAVKIDPGSKATGIAVTRTDENGDLHGLVAVEVRHRGGQISKKLTARGAYRRRRRSANLRYRAPRFNNRTKPKGWLAPSLQHRVDNVIAWVTRLRKLAPVTSIAMETVRFDTQLLQNPEVSGVEYQQGTLAEYELREYLLEKYHRACVYCDATGVPLNLDHLVPRAHGGSDRAANRVLACVACNQAKGASAVEQFVTDPNRLAKILADVKKPLRDAAGVNSTRNALLRGLEATGMPVEAGTGGRTKWNRHHFSVPKSHTLDGLCVGEVSGIAKVSRDVLIASSTGRGTYQRTLPDKFGFPRLHRSRIRQHHGFQTGDLVRATVPSGKKAGTHTGRVAVRATGSFNITTGEGTVQGVHHRHCRLLQRADGFSYQTGKETALLPALTDGVSAREER

SEQ ID NO: 2441 - protein, 594 aa, Ruminococcus sp.
MTNFKLRLYYKGNKNMNYMDFVLIVDKNNKPCIPIKNGKAGYLLREHKAEIINHEPLVIKRTDDYNSDLENRDIFELKVDSGYLNIGFSVSDNDHEYIAGQVKMLNGMSNRLLERKSMRSSRRNRLRYRKNKNIDYKTVHNPTYKNGNEDGWFAPSIVHKMETHIRIIEQLKQWVPIDKVIVEVANFDIAAMDAYLKDGTILNGKDYQNGEMKGYENVVSYVRARDNYSCYFCNKKKKKDGTLKEKPKRIEVHHKIPRSWGGTNNPGNLICVCQGCHQKIHSNNNNNKYFKELLEQALQENTFKDSTYMNIVRWELLNRLTEKYPELDIEAEYGYNTKLIEKKQVLRKFHYNDAVCVKEFKNTTLSKKVFIVEQKRCNDRKMENFADAKYIDSRDGKKKSGNDLKVIRHSTKSKRSTNKEHIDNERVFRKEKVSKGKIQFECHSYCVKPGDLIYIKEGKHKGKIAEVSTIQIVGGKIPNPIIDINEINNKKIDFNRELKKRKTISNMTDYQKSFAKYQIRFTYKESDADGPSITLTQKEYEKLKENKSDRVKIIRTRRGLVWREYDRLTYEAENMDQEEKKLEVKNKKQELKAA

SEQ ID NO: 2442 - protein, 555 aa, Lachnospiraceae sp.
MYVRVIAKDGTPLMPTKRCGKVRHLLETGNAVAIKTRPFTIRLKYETTKYVQDLYGGIDTGRENIGSAVSKENGENVYLADTRSNNGSIHSQMYDRAGFRRERRRHDRQNKQRKAKHDHTEMQNGDKDKVRTTHDCISRKVSYPGAEEPVTHKVIQGKEGKFNNRKRPEGWITPSARQLVQVTMNEVKFMCDTMPIKQLSVERVSFDFQKLANVHIRKWQYSKGPLYGYNSYKDYIYDEQKGKCPFCGEELVHYHHMKPRHKRGTDTVQNIIGVCESCHEMIHCGEITDDMLHEAKDSVVRSFEVSLLNSVMPALIDAMKQFCDQRGIHLVVTDGKTTSDARDKYHIQKDHSTDAYCISLTGCDIDPANAKLDDHIFRKRRFKKKSKNIISARNQRVYYDGKEPVAYNRHRAMDQKTDSLEQYIAKFRLAHTSAEADKHFRSLTVKPARRTYTFHKNGTPAVIHAGDVVRYVKYNKTYGNTKTETFVALSCDMSGEGRVKYGNGNKAKKLKFCRTIAPGALQCVGVERTDVYLRATALEETKRKTVRAGRKKIAG

SEQ ID NO: 2443 - protein, 518 aa, Human gut metagenome
MANLKLIDTLLEKTEYIYVLGADGKPQMPTNRKVRVRSLFKSGLAKIVDTVPFTIRLLYENNAVLQPITLAEDPGRTNIGVAVLTQFGDLVFSAVVETRNKYIKKLMSDRKAHRQASRRGERKARQRLAKKHGSMIKSGMIMRKLPRYAADKFVTCKFIKNTEARFCNRKRIPDWLTPTVNHLVETHINIIRKISKYIPVTDIAVEVNRFAFMQMENPETTGIDFQNGPLKGFNDVKAALRVQQHGKCLMCKNDISDFHHIVPRSQGGSDNIQNQVGLCPKCHKKAHTNENFKQKLADKKVGLLKKYGALSALNQAVPFICKSLLEIYGKDHVHFCTGKDTSLIRTGLGYEKTKDNQMHEVDAYCIGLAAVGADIVNLPKFENIYKIKQFRRQDRSIINYQRERTYYLDGKKIATNRKPRFEQKKDAFSDWYSKRVKSDGKEQADKLTGRVTVKKSIRGYNSKNRLMPGTIFYYNGKRLVLTGQLTGGKYYRAYGDSKTNYPAAKCQVYKQNEGLVFV

SEQ ID NO: 2444 - protein, 512 aa, Human gut metagenome
MSTIYVLNKDGKPLMPTTRGGHVRHLLKEQKARVVQSNPFTIQLLYETNDVVQPLYLGIDPGRTNIGFAVVKADGTAVFAAHLETRNKKIPKLMQDRKKARRARRTNGRRCRRQRRAKANGTISKKCVKQDTAQSKNPSKRAKEIGVIKRHLPGCKKDVLCVGIKNKEAKYTNRARLEGWLTPTANQLLQTHINLVKKIQKFLPISDVVLEVNKFAFMRLDNPNIQKWQYQRGPLYQKGSLENAVSEMQEHHCLFCEKPIEHYHHVVPKSENGSNTIANIVGLCAEHHNLVHKDVAWQEKLVEEKTGLNKKYGALSVLNQIIPALTKELSFLFPKHSFMTNGKSTHDYRAAHGISKDHWLDAYCIACSVLPIDVCDSTINNCVPYELKQFRRHDRRALNNENMNRVYTLNDKVVATNRHKATEQEAASLEEFRKEHPNDVCKLKVKEHHPTYRNMNRNYPGSVFLVGKQIHVMQGIASSKDGKATKYNDTRATTIAAGKCKFVAKNSGILFV

SEQ ID NO: 2445 - protein, 511 aa, Human gut metagenome; identical to SEQ ID NO: 2273

SEQ ID NO: 2446 - protein, 507 aa, Human gut metagenome
MPEYIYVVGIDGKPQMPTRRRRHVNKLLNTGKARIAEHVPFTIQLLYKNEPVLQQIIMAEDPGRTNIGAAVVGLKGQLYLPAVVETRNKEIRKLMDKRRACRRASRNGERKARQRRAKRFGTMLKAGMLMRKLPQYGEDGFITCHVIRNTEARFCNRKHPKDWVTPTVEHLIRTHINLVHKMQKFLPITDVAIEVNRFAFMLLDDPTVAGVDFQKGPLKGYSNVNDAVFDQQDGKCLLCGQPIEHYHHIIPKSKGGSNTLENIAGLCCNCHDTAHKNEDVQKALKDKKSGLMKKYAALSALNQAIPFIYKRLVEEFGKEHVFTCTGRETALVRKSLGYTKTKKNQLHEVDAYCIALLALGCTDAVLPTFEHVYQMKQFRRQNRANINNQRERSYYYEGRLVAKNRKDRIEQKDDSLETWYQKIVQQYGEKEAERRRSVLQVKKSTRHYNTPGRVAPGAVFYCNGERHVLNGQITNGQYFKAVGDAKTNYPAKKCRIVKQNEGLVFLG

SEQ ID NO: 2447 - protein, 507 aa, Human gut metagenome
MPEYIYVLGMDGKPQMPTTRRRHVQKLLDTGKARIAERVPFTIQLLYDNDPVLQPVTLAEDPGRTNIGLAVLDLKGELLLSAVVETRNKEIAKLMEKRRQCRRASRNGERKARQRLSKKYGTMIKAGMVMRKLPLYKADKFITCKFIRNTEARFCNRKRKDGWLTPSARHLVQTHINLIHKIRKYLPVTDIAFEVNRFAFMQLENPSVSGVDFQNGPLKGYDDRDAAVYDLQDGKCLMCRHGITQYHHIVPRSRNGSNTIGNIAGLCDTCHDKVHKDADFAKQLKDKKEGLDKKYGALSVLNQAIPFICQKLEAEFGKEHVHYCTGRETSLVRRSIGYHKTKKDQFHEVDAWCIGALALNWIPERAPDFTEVHLVRQFRRQDRSLIKAQTERVYKLDGKTVAKNRKKRTGQKTDSLEDWYNKQVESYGKPKADQLRSRLTVEKSQRRYNDPFRIRPGTVFLYKGKRYVLSGQLTGGRYFRAVGDMKTNYPAAKCRILKQNEGLVFIS

SEQ ID NO: 2448 - protein, 498 aa, Human gut metagenome
MAVVYVLSASGEPLMPTTRCGHVRMLLKEKKARVVERNPFTIQLAYETEGVTQPLYLGIDPGRTNIGAAVIREDGECMFTAQLTTRNKDIPKLMKARKQYRMAHRRLKRRCKRQRRAKAAGTISPQKEIQRLLPGCEEPIICKGIRNKEARFNNRKRPAGWLTPTANHLLQAHINLVKKLKKFLPITGVVLELNQFAFMAMENPRIQRWQYQRGPLFGKGSVEEAVYAAQDGHCLFCEKGIDHYHHVVPRRKNGSETLENRVGLCEEHHRLVHTEDAWTKKMAAMKAGMNKKYHALSVLNQIIPSLTERLAELFPQHAFVTTGQNTYHFRVDHDIPKDHYLDAYCIACSVLSNAQKVSPPKREPYDIRQFRRHDRQACHKANITRKYYDADGKLVAANRHKAMEQKSDSLVEYRENHSDVEVSQLRVKPHFPQYKEMSRPMPGSLLATNGGNIFTLMRSDGKHYGKADYFVDTQGIKHLAKRCILLQNNQGIIFAEIG

SEQ ID NO: 2449 - protein, 489 aa, Mouse gut metagenome
MPVYVISSTGKPLMPSRRFVHVRLLLKEGKAKVVKTKPFTIQLLYESTEYTQPLYGGTDPGRTNIGEAVLDQCGTVQYAAHVESRNKDIPKLMENRAAHRSASRRGERKRRQRRAVANGTITFPLQKQRILPGCQKPITNKFIINSEAKFLNRKRPANWLTPTTNQLVQTHLNMVKKICSILPVTDWTLEINKFAFMLMEDGTIRGVDFQNGRMKGYPDVEAYIYAIQDGKCPFCGKTIEHYHHIKPRSEGGSNRPENLVGLCSDCHARIHKGDTEMAGLIDKLGEQKKYAALSVLNQAIPYIYQGLVEIFGEEHTHICYGWQTKEMYTKLKIPKTHSNDAICIAALGSGVVPPIQMTNPYEVKQCRRHNRAIVKAQRERTYKLFGETVAKNRHPRFKQEGPSLEDFVESIPAAYRQQVISVLKVTPSKRYYNTMDRDLPGTVFYYQGHRYVKSGQSSGGKDLRAYGMGSKNFPSAKVSIVPSGGVVYL

SEQ ID NO: 2450 - protein, 494 aa, Human gut metagenome
MAMVYVQNKDGKPLMPTTRYCYVRLLLKENKARVVSTTPFTIQLNYDTPDITQDLILGIDPGRTNIGVAVVKEDGQCVFSAHLETRNKDVPLLMQKRAGFRKQHRTLDRRRKRQRRAKVAGTTVEGETIERLLPGYEKPVVCHYIRNKEARFNNRSRPAGWLTPTANHLLQTHINLIAKVAKFLPITKVVVELNRFAFMAMDNPNIRRWEYQQGPLYGLGSVEDAVYAQQDGRCLFCKKPIDHYHHVVPRHKGGSETLANRCGLCREHHALVHTDKVWADKLVTRKEGVNKKYHALSVLNQIIPHLMEYLGSETRYDVYATDGRSTKGFRVAKNVPKEHYTDAYCIACSILDTDIEVSTPVEPFELKQFRRHDRQSCHQQRVDRKYYLNGKQVATNRHKAIEQKSDSLQEFRESYGDTAVSQLAVKPHSPQYKDMTRIMQGAVMDFGGTVGVFQGSDGFHNGKPDYYKSAKGARVLTKRCVLLAQNTGIVFIPA

SEQ ID NO: 2451 - protein, 496 aa, Metagenome; identical to SEQ ID NO: 2063

SEQ ID NO: 2452 - protein, 568 aa, Erysipelotrichaceae bacterium SG0102
MSGKKNKSNHYIYVVDRHGNPVMPSRRPGRIRHLLKEGKAVPISTHPFVVKLKYDIPGRTQPIHLGIDTGRENIGVGASLENGENVFLSDVETKNKAVTKAMSDRRAYRMSRRRHRREKKQRHAHAKKSEMKNGRPAVKGERHTRKTVGRDIRYPGCKNPVTHKVIKGKEARIANRRRDEGWQTPSARQLIQTHMRIVRNVMKFLPVTHITIEMVSFDFQKLANVEIKNWEYSDGPLHGFKSPADYVWARQNGKCYFCDKKIAICHHAMHRAKGGSDRVGNLVGLCPECHQKLHSDRDMDKRLQEEFGTPKTCISVLNSAMPEIDRQMRALCDARGIVYDTCTGFDTYEARKRYGIPKDHCTDGYAISLYGRNANNVCLTDSVCMMRRFRKKSGSIIQKLNQRVYKLKGKVVAVNRHKRTDQKEPALDDYMSRYAQKHSEAECRRHFHELKIIPARRTYTYRKQKLVSPVHIGDTVRYEKRNKTSGITKKAVFVAEEIDMFNGKVKYGDQSGRYGKKSPLMKYCRPIKAGSLKFIRTIRLADCLSMARKEAEVRRKKQLKKPKNLVID

SEQ ID NO: 2453 - protein, 671 aa, human gut metagenome
MKPWITTRILQASVREDARKCRKETIMVAVLSNTDVALMPTSSCRARILLRSKRAEIVGYHPFTIRLLDRETGNTQPIEYKSDTGSVYVRVSICSEKHEYISEERILLDDEKKKHDNCRTLRRTRRNLLRYRKPRFDNREKAKGWIAPTLQNKLDRQLDIFHAYKKVMPITSATFEVGKFDIQLLAAMESGKPVPEGKDYQQGARYQQETLRQAVFFRDSFTCQVCQKGVKDGVILRMHHIGFRKNDHSDRMANLLTVCTTCHSSKNHNPGGELWDLKPEIKPLHDAAFMNTIRWKLIDTLKETHPDVELHFTYGARTKCTRRTMHIGKSHANDAYCIGEFHPKHRCDTVYYQKQRRNNRVLEKFYDAVYLDLRTGEDEKAAALGSGRTKRNTHLAYKDQRPYRGRKVSSGHRSITRKRSPYKKGDILRVQKEYTVKEPDQNGKLQKVIKVMDVTAKLASSHSKVDSKTLKAFRTGKIKKIPKSAVMMAYDFTEPLPNGRQSCDGKHVKAVKTTKIQAWKRISKPELKKRRLTPNDKEQTRRIPRTTYKGGGTLRHDNGKTVFRIPYIQIKNKGFKIASQISRSSVPDRPHPYRIFLPVAICKRRLYAWAARYAGTRFLKCHDRWLYAADVLICTFHQPIHYGIHYHAAYDRGISEYRGNAKGRKDRTGPF

SEQ ID NO: 2454 - protein, 537 aa, human gut metagenome
MQYVYVVDKHGKALMPTTRYRHVRKLLKSGKAVAICNKPFTIRLKYESSTYTQDLWEGIDTGRQNIGDAVSNEKGENVYLADVRTNNKSIKSNMQDRAGFRRERRRHDRQSKQRKAKHDGTEIQNGDDDTVRTKHSCKSIKISYPTADEPVIHKVIRGKEGKFANRKRPEGWITPSARQVIQITMNEIRQTARILPVNHINLERVSFDFQKLENQDIRRWEYGKGALYGYKTYKDYIWDEQHGKCACCGKPITQYHHIIHRAEGGIDSVKNIIGLCNGCHNKIHASKDAEDKLKELKEGVRQRYYVGLLNSVIPALIEEVSAYCDEHGIEFTVTDGKTTAETREKYGLSKDHCTDAYAISLADRDVKSVSVSDRIYEKRRFKKKSGNIIAKRNQRVYKFDGKIIAYNRHKATNQKDDSFEEYMTKYAETHTDKECRQHVAQIEIIPAKRTYTYHKQGLVAPCHAGDIVRYEKHNKIKGNTKKDTFVATSVEMNGEGHIKYGDACGSRKIKFCRPIDSGCLQAVHNYQADEYLRKIAE

SEQ ID NO: 2455 - protein, 536 aa, Human gut metagenome
MKYVYIIDKHGKPLMPTTRFGHIRKLMKSGKAVPISNNPFTIRLKYDTTSYTQDLWEGIDTGRQNIGDAVSDKDGKNVYLADVCTNNKSIKSNMQDRAGFRRERRRHDRQSKQRKAKHDGTEIKNGDDDTIRTKYFCKSVKISYPAADEAVTHKVIRGKEGKFANRKRPDGWMTPSAKQVIQITINEIKQTAKILPITHINLERVSFDFQKLENQDIRKWEYGKGILYGYKTYKDYIWDKQHGKCACCGQPITQYHHIIHRAEGGIDNVKNIIGLCDACHDEIHGSQDAEDKLKELKEGVRQRYYIGLLNSVIPALIEEISAYCKKNGIEFMVTDGKMTADTRKEHGLQKDHCTDAYAISLAGRNITTVSVSDTIYEKRRFKKKSCNIIAARNQRVYKFCGKIIAYNRHKATNQKTDSFEEYMAKYTKTHTEKECRQHVAKIEIIPAKRTYTYHKNGLIAPMHTGDIVRYEKHNKIKRNTKFETFVATSVKMSGEGHIKYGDKCNSKKIKFCRPIGSGCLQVIHALCTEEYLKSLA

SEQ ID NO: 2456 - protein, 515 aa, Ruminococcus sp. OM08-7
MTTLEERLSKTEYIYVLGFDGKPQMPTRRKRHVLKLLKTGRARIAEDIPFTIRLTYRNAPVLQPVTLAEDPGRTNIGAAVLSPLGDLLFAAVIETRNKEIKKLMADRKKSRQASRRGERKARQRLAKRYGSMLKSGMIMRKLPMYAADKFVACKFIRNTQARFCNRKRCTDWITPTVQHLVQTHLNIIRKISRYLPVTDIAIEVNRFAFMHMENPKAVGVDFQNGPLKGYDDVKEAIRTQQHGKCLMCKKPIAHFHHIVPRSRGGSDTIQNLAGLCTEFHTKVHTDTAFRKDFDEKKSGQLKKYGALSALNQAVPFICKKLLEEYGEEHVHFCRGLDTSLIRTALGFEKTKKNQMHEVNAYCIGLAALEVNEVAAPAFDHTFQIRQFRRQDRSIIHHQTGRSYYQGKEKVAQNRKPGFEQKTTALSQWYKEQVRIHGEKEAEKLRSQLRVEKSCRHYNDMDRFLPGAVFLYEGKRYVLSGRITNGKYLRACGQGMKNFPAAECTFIRHNAGLVFI

SEQ ID NO: 2457 - protein, 544 aa, Ruminococcus sp. AM36-17
MKQKKQKVIVYILNKKGKPLMPTTRCGHVRKLLDSKKAVVVNSNPFTIRLKYDTPNGVQDVFAGIDSGRENIGSGVSNEDGDCLYLGELRTSNKSIKMKMNERAGFRRERRKHDRQNKQRKARKDHTEIQNGKADICRATISCKSVQISYPTAEESVTHKIIRGKEGKFANRHRDGDWITPSARQLVQIHMNDLKSICKILPISHVTLERVAFDFQKLENENIKAWEYGKGKLYGYDSPEEYIHDVQDGKCLVCGKPHIDYLHHIIPRSKGGSDKVSNIAGLCYDCHYGPMGVHNCQDTQDRLPELKNEANKQYKVSLLNSVMPVLIEEIDKFCKANSIMFSICEGHDTAKVRDMYDLQKDHCLDGFAISLVGRNVKSVDVMPDRIHQKQRYKKKSKNIIQKRNCREYYDGKKLVAINRHKGTDQKADSLEEYMNTYAETHTADECKMHFESLTVKPARRIYTFHKEGRICPLHIGDKVRYEKKNKIKGNTKVDTFICEGIYFSKDENKAKVEHNKTKSKKMKFCRAIESGCIPYIDYIKFALI

SEQ ID NO: 2458 - protein, 457 aa, Lactobacillus salivarius
MSKSQIKKLIYVVDSNGKSLMPTTRNRKVRHWLATGQAHWFGNSRKTIQFTRPVNQHIQPVTVGVDLGRHTGISAVDQSNNREYYSAQVERPYVQEVKRNKQRKMYRTQKRHRLRHRQSRFDNRRKPNGWLAPTIQHQLDFIDYEIQRVSQFLPVDKIVLEDQPFDIRKLTNDNQRPADYTKGPQSGFASLKAYLYASQNGIDPIDGQHYLLSDMVVHHLLPRSQGGTNSPHNLVLISKEHHNNANHRNGVLKHLAQQLRDCLDTRGAYLMNILYNRLPEQLSNIAPVVFTAGYITAQNRKTYGINKSHINDALVIAGGNAQTIRLAPSIKRVKLRRNNRSLAKFYDAKYEDLRDGQIKSGQELSSGRTSRSREYHYDNQRIYRARKIKKGRTSIRKNHYQLRPHDLIKYQNHIYEVNGVHNNGHRVLLFINCKKKSVAISKVTCIKHVNGILETIL

SEQ ID NO: 2459 - protein, 466 aa, Human gut metagenome
MSTCACVLSKSGERLMPTIRLGKVRHLLKDGKAKIIKHHPFTIQLLYDSETNIQPIEICEDVGYNYIGISVKSESHEYVSVQYDTLQDEKDCHDSCRKMRRIRRNRLRYRKPRFDNRKRNKDWLAPSLEHKKELNVNVIKMYCEVVPITHVTVEVGSFDTMLVKAIQEGKAIPEGADYQKGPRYNLATLREAVFYRDNYTCKVCGRKAKNDSAILHVHHMFYWKGRHGNSLNELLTVCEKCHTPANHQKGSKLYGFGENIKFANLSGAAFMNTVRWQIVNELYATFGKLFVTFTYGAMTKEKRIALHLEKCHNNDAYAMGNFHPVDRCAFEHYKKVKRNNRILEKFHDSQYIDIRTGKVANGRSLFNGRINRSHKKDSENLHKYRGKRTRKGYRALRRKKVALNPGDLVSLNGEILVVHSTHAGKNGYVGVEFKTPSKSGKKSASLKKLKIVKTSNSMHSAWTKVS

SEQ ID NO: 2460 - protein, 437 aa, Ignatius tetrasporus
MNTILVLSSIKIPLMPSHPARARQLIQSGKAKVYRHNPFTIILTERNQGNIQPIECKIDPGSQTTGMALVVQGKKQTKALLGIHLKHRGKHITQALKKRSVSRKFRRSRKTRYRPPRFLNRTRPIGWLPPSINSRLNNITNWVRKLKVWAPLSSIEVENVKFDIQKLQNPEIQGIEYQQGTLMGYEVREYILEKFHKTCAYCGQTKGRLEIDHIIPKSKGGSNRMSNLTLACQRCNQKKGNQSLTEFVKNKQKLEKIKAQCRTSFKDAAIVNSMRKALVSTLKKFHLPVYCWSSGLTKYNRVRQNYEKHHWIDAACVGNSGSNVCLPRNSSVLTITAMGRGNRKKCQMNKYGFPKSKPKQAKRVHGLDTGDWVKIRALSPEQNANRNEKNQITRPVYGRVTVRATGNFAVTPKNGKQVSIMYKYCFLLQKNDGYNYT

SEQ ID NO: 2461 - protein, 457 aa, Unknown; identical to SEQ ID NO: 2055
  Delaware Bay aquatic sample metagenome

SEQ ID NO: 2462 - DNA, 322 bp, Ktedonobacter racemifer; identical to SEQ ID NO: 2060

SEQ ID NO: 2463 - DNA, 249 bp, Ktedonobacter racemifer
gtcaggaaccccatgcctaaaggcaggggcttgcgtaagtaagcctggacctgaccagtctcagccagagcagacttgatggatagaatcatcaaggctatcgggctacgttaggaacgaaataggtacgttggggtgctttgccgctacggtacagcattaaacatccctagagggttaaggacgtgtgttgtacgtaaaaccgtttgctaacattgacgaggcacacattaccctggaagacaggag

SEQ ID NO: 2464 - DNA, 289 bp, Ktedonobacter racemifer
gtcaatgaccgccggtcggagaccggaggcttgggagagcctggctcttgcaagccgattgaccagaccaggttcttgagagagcgttgccgagcttctctgcgtcaccgctcccgctgagagaacgtcgatgcttccaagtgttcaagatcgtactggcgggtgctgccccagcctgccaccctacaacggcttctttaaaacaggtgatgaggtcagtcccagtgagaagccgaaagtaccgagaggcatcatggtcgaggggaagagaatactccgaaaggaagtt

SEQ ID NO: 2465 - DNA, 345 bp, Ktedonobacter racemifer
gtgaactaccacagaaccacgtcttcagtgacttccgaagaagccactgaagacgtggttctgtagcttcttcgggagcctgagttcaccagactcgtttccagaaatgggaacggcgttcgattggtcatgacacctgcggttgacgcatcagaccgctgctctgtcgctgagagttaagtaggcttgaggtaagggctggtgctctcggcgtaaaaagcctcttgaacattgtcgagatgaagccggattctcctggtggtcactacctgaaggtggcacggcagccaggagatacgcaccacctgctggcaacagcagagcatttttccgaaaggaacattg

SEQ ID NO: 2466 - DNA, 332 bp, Ktedonobacter racemifer
gtcagcgaccccaccggtaaaccggggggcttgtgggagactaccctgagtggtcttggctgcgagccccgatgctgaccagcccccggtgtgctcgcacaccggagccgttcagaaggagcgcgaaaaagcagaccctggagtggcttttccagctcccggctctttaattgctcagttaaacaggttgatggggtgtccaaagccagtgctgagcaaagatcgccgcttctgacacccgggcgaggaaaacattaccgttcgtgtgtgctggacaggaaggcgcacaccaacgcgatgcctcattacgaggcccccgcaaggggagaaca

SEQ ID NO: 2467 - DNA, 323 bp, Ktedonobacter racemifer
gtgaactaccactgagctgaagacgcagcggcttcttcggaaatcgtcgggtctgcggtttgggagctttttaggaagctcaagttcaccagactcctcatcagaaatgatgagaccgtttgaaaggtcatgacacctgcggttgacgcatcagaccgctgctctgtcgcctgggtttaagtagggctgaggaaaggcccggtgatccaggtgcaaaaagccttttgaacactgtcgagatgaggtcggattccctgcatggtcacagtgcagggatacgcatcacccggcgcttgccggagtatttttccgaaaggaatcgt

SEQ ID NO: 2468 - DNA, 273 bp, Lactobacillus equi
gtcaacagacccgttattaaaataacgggcttgcaatgtaaattgtaagcatggttgattagcctcagtattaagttactacgttaccactgaaattaggtactccgggatgccaccctagtctcggactctacgcttgcttattaaacagggctgaggtcaggcccagtgtaagtgagatttaaaaccagtggctaacattggcgaagggtacacacgcattgctcttcggggataatgcgacttataacccattaaagaaaggggtgggcc

SEQ ID NO: 2469 - DNA, 291 bp, Petrotoga olearia
gtcaactacccccatctaaagatggtggcttgtaaaagtcatagttgattagcctcagccagggttgtaagaccatccggctacgttatatcggaatgggttatccttaagaggcgaaagcccgtttaacctaaataggcactctagggatgctccacaagttccagactctgcggtcagtgattaaacatctctgaggggtaggagaagtgttgctgacaacaaacccgatataacattggcgatgtggacttaccgctgtgaagcggatttatttccgaaaggagattt

SEQ ID NO: 2470 - DNA, 285 bp, Petrotoga olearia
gtcaactaccctcgtctaaagacggagacaaaaagtctcggagttgaccagcctaagttccaagacagcctcacggcggataagagagacagccttacggcaaagttggagaactacgttattctggtcatgacaccttggaatgcccgagccagttccaagctctgtcgttcaacattaaacaggcatacggggttgaagtcagtgtgttgaatgtaaaaaagccagaataacattggcgaggctcacattaccctgatagggagaaaggaaggtaacttccgt

SEQ ID NO: 2471 - DNA, 262 bp, Petrotoga miotherma
gtcaactaccccggtctaaagacgatggcttgtaaaagccaaggttgactagcatgagtctgaaaacagccttacggcaaagttgaaagactacgttattttagttatcacaccctcggatgatgccctagtccgttgctctgtgtaggctccgtaaacagtcctgtgaggtagggacagtcgacctaaggaagtcctggcattccaggcaagctaaaataacatttgcgaagggcaactactccgataaggaggaatactt

SEQ ID NO: 2472 - DNA, 294 bp, Lactobacillus composti
gtcaaccgtgacccctcactaaagtaaggggcttgaagtgcctacttcaagtctggttgtctagacttagcgtcttttggacactacgttatcttggtgatcacacttggaaatgataccctagttcccagctctgtgcgggcgctgtaaacagtcctaaggtcaatgggaccgtcaacccgtgagaaagctgctgctcgtcagcagctaagccttgataacattgtcgaagggtaacctcacgaactcaagtctgatgaacttgacgccgtggtcaggtcattttacctgacg

SEQ ID NO: 2473 - DNA, 308 bp, Lactobacillus equicursoris
gtcaatggtaaccccttactgaagtaaggggcttgaagcgcaagcttcaggcctcttatctttagcagggaagctggagaaattcggctttcattgtctagactaagctatccagtcggcttcggctgactgaatagagaaactacgttatccatgtcatcacacccaaggatgatgcccaagtccttggctctgtggcagctctgtaaacagtcatgaggttaacgtgacagtcaactgcgcccacaagcatggataacattgtcgatgggcaacaacgcaaatccaaattgggtctcctggtttgg

SEQ ID NO: 2474 - DNA, 300 bp, Caldicellulosiruptor bescii
gtcaactacccccgcctgtagaggcggagacttgaagggcctcgtggttgaccagcctgagggactgacccgaaggacaagggaatgaagtccctacgttatccctgcctagggcactctggagtgcgtcccaagctccagaccctgccgtgcagacttaaacagtcctgtcggggtagggacagtggtctgcacacagcaaagtagggataacattggcgatggaagatgcaggtgtagtccaacctgcacgtcacccagcagaatcaaatcctgctggagaagggaggagaactccaa

SEQ ID NO: 2475 - DNA, 260 bp, Caldicellulosiruptor bescii
gtcaactaccacccccctgaagaggcggtggcttgctggcaagggtggactgccggtgagtctgcctgctggcaggtagttgaacgtgggtgatgctgtagcagaacctgacgttccgggacgacactcccagttccgggagacagcggtgcaatcccgcagccttacacagggtgctacagcacgcctcagggagacctaccaccttccttttggaaggtgcccagatcatagggctcctgaacaaggagggaaagaat

SEQ ID NO: 2476 - DNA, 344 bp, Streptosporangium roseum
gtcaacgaccacctcttgaaggagagggcttgaggtgccgcaccgcgcgctgacggccccgcgttgaccagcccaagtcgatcatcttgaaggaggtgcattcgattgactacgtttcacgtaggtcagcagacccaccagtccgtgcttcctcagcgggctgctctggaattcgcgtcagcagacacgcccgagggtgggcacgaaacgggacgcggacaccgcctcagcacggtaaccggtgtggaacatgggcgaggggagatcgcaccggatggcacccgtctgctgcgacgtcaccccgaagacacttcggtgtccgagggagcggaccgtgaggttca

SEQ ID NO: 2477 - DNA, 287 bp, Allochromatium vinosum
gtcaactacccccgcctgaaggcgggggcttgtgaggcgactcacgagccgggttgaccagggacagcggtgaacatccgctgcgtttgcaacaggtcgttgagacccactccgggatgcttcctcagtcccggaccctggaaggtcggagtcatgcaggcgaaaggcaaagcgccgaaggttccgatcgccgccgcgaggcgggagccggttgcagacattcccgaggggagcgagccgcaaggctccgtcaccaggcccgtaagggcagacgtttggaacagacc

SEQ ID NO: 2478 - DNA, 246 bp, Anoxybacillus amylolyticus
gtcaactacccaccacttaaagccttgggcttttgaagtgggggcttgtaaaaagccctagttgactatcccaagtctttcgaggactacgttggttgggtcatgacacctacgaatgctcctctagttcgtagccactgtcgttgatggttaaaagtcctgatgggtagggacggtgctgtcaacatcacaagcccttccaacatgggggaagaggaagaacactccgagaaaggaggtacacgc

SEQ ID NO: 2479 - DNA, 291 bp, Paraburkholderia hospita
ggcaaccaccccgccctaaaaaagggcggagcttgaagcggtgaatcaagctcgggttgaccagaccgagcgccgcgaggcgctacgttgcgcagaagatagcagacccaccctgacgtgcttcctcagcgtcaggctctggaaggggcggttgcagacaagcgaccgggtaagcacgaaacggatcgtccccgtcagttctatcactgacacctgctgcgcaacatggtcgaggggagacttcccgcaaggggagcgtcaccaggcccgtaagggcaacgttttttaagg

SEQ ID NO: 2480 - DNA, 321 bp, Paraburkholderia hospita
gtcaatcaccccggcctgataggccgaggcttgcggggaagcatcctgcaagtctgggattgaccagacccagcgctggacggcgctacgttgtgcagaagacagcagacccaccgccagatgcttcactcagtctggcgctctggaagtcgcagcagcagacaagccccgggtaggtacgaaacgggctgcgaccggtgaactcaccctcaccctctgctgcacaacatggtcgaggggagcggcgccgcaaggcgcccgtcaccaggcccgtaagggcaacgcgccggacgttttccggcggcataacaaggagcttgg

SEQ ID NO: 2481 - DNA, 261 bp, Methanobrevibacter millerae
ttaaactaccacggcttatagaagccgtagatttctagaattttctgggaatctacaagtttaatagactcagaccattaaatcgtggtctacgttacccaagaatatcataggtaccgtggaatgtttaatcccagttccacgctctacggtaagtgattaaacaagttctgtgatggtaggaacagtgttgcttacaatctaaaaccttgggataactttgtcgagggataaaataactcaggaataggaggtaaacat

SEQ ID NO: 2482 - DNA, 257 bp, Eubacterium oxidoreducens
gtcaactaccacgcacctaaaggtacgtggcttgtaaaagccacaagttgactagcctaagttctttgagaactacgttacccacaaatatatagttaccttggaatgtttagcctagttccaagctctaaggtatgtgattaaacaatcctgtgtggtagggatagtgttgcatacataaaactgtgggataacattggcgaaggctttctaaccactcttcggagtgggtaattaaattattgaaaggagcatag

SEQ ID NO: 2483 - DNA, 223 bp, Fervidobacterium changbaicum
gtcaaccacccaccactgaagtggcgggcttggaaaaagccctggttgactaccctcagcctttcggctacgttaggctggtcacggcaccatggaatgctgctcaagttccatgccctgccgtctgccactaaacagtcctaatgggtagggacagtgtggcagacacgacaagccagcctaactttggggatgagcacctaactccgataggaggcttacc

SEQ ID NO: 2484 - DNA, 292 bp, Fervidobacterium changbaicum
gtcaactacctccgactgaagtcgagggctagtaaaagccttagttgaccagcctgagcactggacccgaaggacaaggggacgaaggtgctacgttggtagtaggctcaagacccactccgggatgcttctccagtcccggaccctggaagtgctggttgcagacaacctttggggtgtgggcgaaacggaccagcacacgtgccggctaccaacattggcgaggagagtgctaaagtgagtccgctttagcacgtcacaaggcccgtaagggcattttcatggagtgaga

SEQ ID NO: 2485 - DNA, 292 bp, Allochromatium warmingii
gtcaacgaacccccgccttatggcaggggcttgtgaggtgactcgcaagccacgttgaccagggaaagcggtaaccaacccgctccgtttacaataggtcgtcaagactcaccggcggatgcttcctcagtccgccgctctgaaaggtcaggattaggctggcgcaaggtaaaacgccgaaggttctgatcgccgctgcgaagcgggagccggttgtagacagtcccgaggggagcgaagcctttgggcttccgttactaggcccgtaagggcagatgtttgagtgtgaata

SEQ ID NO: 2486 - DNA, 241 bp, Caldicoprobacter faecalis
gtcaactacccaccacttaaagaagcgggggcttgtaaagagccctggttgactagcctcagccaccagcaaaaagttgacggggctacgttagacaggtcatgacaccccggggtgctgctcaagctccgggctctgtcgtacaggtctaaacagtcctgaggggtagggacagtgacctgtgcatgacaagcctgtctaacattggcgatgagcacctaactccgcaaggaggcttacc

SEQ ID NO: 2487 - DNA, 240 bp, Halolactibacillus miurensis
gtcaattacccaccacttaaacgctaacgcgttttgaagtggggcttgcaaaagctctaattgtctagcctaagtctttcgaggactacgttagaaaagtgaatacggctttgtatgattccctagtacattttgtcgttcaggcgctgtaacaactctgagaggtaggagtggtcaacctgttgcacgaagcttttctaacattggcgaagggaaactaaccctaaaaggagggcgaat

SEQ ID NO: 2488 - DNA, 263 bp, Alicyclobacillus macrosporangiidus
gtcaaccaccccacggctaaagccggggacttacgatgagtaagcccggggttgaccagcccgcacgaaggcgacggccttcgcgcagccgttatcccggtcatggcaccctggggtgcgaggccagctccaggccctgccgtccggcattaaacaggcatacggggttgaagccagtgtgccggacatcacaagccgaggtaaccgggcgaggccaacgttacccccaatcggggagaagggcaggtaactgccatgaaaca

SEQ ID NO: 2489 - DNA, 344 bp, Desulfotomaculum thermosubterraneum
gtcatagaccccacgcctaaaggcgggggcttggccggaggcaactcccgtcaggtctccactttgggtggaaagctgctctctggagcagcgctatgacccgcctcagtgtgggagcctgcggaccaggcggttgaaccacgctacgttaagggggccaacacaccctgggatgcttctccagtcccatgccctgtggtgcggcattaaacagcgagcgggggtgtcagcgagcagtgtgccgcacgcaaaaaacctccttaacattggccaggagagacgcccgggctggtccggcccgggcgcgtcacgagccccgtaaggggtctccgaaaggggaaggt

SEQ ID NO: 2490 - DNA, 233 bp, Fervidobacterium gondwanense
gtcaacgccccaccactgaagtggcgggcttgaagccctcgttgactagcctcagccaaagccaataggcttcttggctacgttagatgggtcatgacaccatggaatgctgctcaagttccatgctctgtcgtctgtcattaaacagtcctgaggggtagggacagtgtggcagacatgacaagcccatctaacattggcgatgagctcctaactccgcaaggaggcttaca

SEQ ID NO: 2491 - DNA, 286 bp, Desulfobacterium vacuolatum
gtcaacaacccctgagctaaagactcaggggcttgcaaggcaacttgtaagcccggttgattagcctaagccccagaaaacttggtggctacgttacattggaatatatagtcatcccaaggcactccacacgccgaaggctctgagatcagtgtttaaacatctctgagggtaggagaagtgatgctgatattgtaaacccgttgtaacattggcgaagtggatcactcacgtatgtgagggcaggacttgagagtctctgccaaattctaacacaaggatttaa

SEQ ID NO: 2492 - DNA, 258 bp, Desulfobacter hydrogenophilus
gtcaactacccctcctgaatcagagattcagaaggggcttgtaaaagcccgagttgactagcctaagtcctcgttattggggactacgttcggcaggatgtagatacctttggatatattcgccagtccaaagcactatcgtggctctgtaaaagccctgtgaggtaggggcggtcaaccacattgcgaagcctgctgaacattggcgaggcgaatcttacccctcttcggagggtgtcgataaccgaaaggtttttt

SEQ ID NO: 2493 - DNA, 297 bp, Paraburkholderia nodosa
gtcaactaccccaccctgaaaggtggagcttgaggcggtatatatcaagctcgggttgaccagaccgagcgccgcaaggcgctacgttgcgcagaagacagcagacccaccgccggatgcttcacccagtccggcgcactggaaggggcggttgcagacaagcgaccgggtaagcgcgaaacggatcgtccccgtcagctttttcgctggcacctgctgcgcaacatcgtcgaggggagacttcccgcaagggatgcgtcacaaggcccgtaagggcaacagttttacaggagcagc

SEQ ID NO: 2494 - DNA, 314 bp, Caballeronia glathei
gtcaaacaccccggcctgagggccggagcttgcgggatcactcgcgggctcgagtttgaccagaccaagcggtagccagtccgctacgttgtgcagaagtacaagacccaccgctggatgcttcctcagtccggcgctctggaagtcgcagcagcagacacgccccgggtaggcacgaaacgggctgcgacgaggcgtcaagccgaagctgctgcacaacatggtcgaggggagcggagccgcaaggttcccgtcacaaggcccgtaagggcaaccgcaccggacggattccgggagagtttcagaggggccgc

SEQ ID NO: 2495 - DNA, 223 bp, Exiguobacterium antarcticum
gtcaattacctatcactaaagtgacgggcttatacagcttgaaattgactagtctaggttctcacgaactacgttggttgggtcatgacacctctcggtgcccgttctagccgtttgccctgtcgtctgtgattaaaagtcctgttaggtcggggcggtgttgcagatggaaaaagcctttccaacattgacgaagaacatctgactcttaaggaggaaaacg

SEQ ID NO: 2496 - DNA, 291 bp, Acidihalobacter prosperus
gtcaaccacccctccctgaagggaggggcttgtagggagacctataagcccggggttgaccagggaaagcggtaatcagcccgctacgttggcgacaggtcagaagacccactccgagatgcttcctgagtctcggaccctggaaggaaccgttgcagacaaggcacgggtagccacgaaacggacggttcccgccggtcgatccggcaagccggttgccgacattcccgaagggagacgccccgaaaggggcgcgttacaaggcccgtaagggcgttttttggagaaaaa

SEQ ID NO: 2497 - DNA, 300 bp, Caldanaerobius polysaccharolyticus
gtcatagaccccatggctaaagccaggggcttgtgagacaagcccctgcagctcagccagacctatgaccagcctgagtgctggagttcagccggaacgatgaaggcactacgttggaagggcgcacaccttaagatgcattcccagtcttctgccctgtggcacagcgttaaaagcgagcaggggtgcagcgagcggtgcgctgtgagctaaaccccttccaacattggcgagggaagactgcagatcggcaatctgcggcgtcaccagccccgtaaggggctccgaaaggagaggagg

SEQ ID NO: 2498 - DNA, 299 bp, Azohydromonas australica
gtcaaccaccccgccatgaagggcgaggcttgaaagagcctggttgaccagaccgagaaaggagcttcacagcaccaatctacgttgcgcacaggacagcaaggccgacgttgaagtgcttctccagcttcaacctctcgaagccgcagcagcagacaaccccggggtagggacgaaacgggctgcggcgggtgccccgtacggggtgccacccggtgcgcaacacggtcgaggagagcgtggccgaaaaggccaccgtcactggagcccgtaagggcagtatttcaaggagccgccgc

SEQ ID NO: 2499 - DNA, 301 bp, Enterococcus cecorum
gtaaactaccacatacccaaggatatgtggcttccattaaatagtttaccagactcagtatatagaaatatatactacgatagttaagtcatgacacctttggttgacgcaacagaccaatgctctgtcatatacgtttaagttaggttggagtaagcaaagccttgtgacgtatatctaaaaagcttaattatcattgtcgagttgaagacggaaaaaatcatatggtaatagtatgatttaagtacgcattacctgcttttaagcagcgtttttaaatatttttattttaaaggagtga

SEQ ID NO: 2500 - DNA, 321 bp, Bacillus humi
gtgaactaccacgagcctaaaggcatcgtggcttctgaaaaagaagctacatggttttagcttcgtccctccaagggtgggttcaccagacttaggtaggagaaatcctagctacgatagattggtcatgacaccttcggttgacgcaccagaccgttgccctgtcgcttgcatttaagtagagatgaggaaagtctcggtgatgcaagtgcaaaaagcctgtttatctttgtcgaggtgaggacggattccttgtatggtaacagtacagggatacgcatgacctactttcgagtagagattttatctgaaaggatgtaa

SEQ ID NO: 2501 - DNA, 305 bp, Micromonospora viridifaciens
gtcaacttctcggccctgacggatcgagcttgctcggctcgtcagggtggttgaccagcccgaggaacctctgaaagggaggtgactacgttgtacacaggtgtgaagacccactccggggtgcttcctcagccccggaccctggaatccgcgtcagcagacacggccccgagatgccacgaaacgggacacggacgccgcaaggcagccggtgtgcgacatgggcgaggggagaccggcgtgagccggcgtcacccggaacccgcttcggcgggaaccggagcgggccgtgaggcccacaccca

SEQ ID NO: 2502 - DNA, 301 bp, Micromonospora siamensis
gtcagcttctcggacctgagggacgtgaacgttcggccctgagggtggttgaccagcccgagaacctctgaagggagggatctacgttgtacacaggtcagacgacccactccggggtgcttcctcagccccggaccctggaatccgcgtcagtagacacggcaccgagaagccacgaaacgggacgcggacgccacccggcagccggtgtacgacatgggcgaggggagaccggcggacgccggcgtcacccagaacctgcacccgcaggaactggagcgggccgtgaggcccacaccca

SEQ ID NO: 2503 - DNA, 240 bp, Clostridium magnum
gtcaactaacccccacttgaagaagtggtagcttggagaagaaattctttgaagccctagttgactagcctaagtagcgaaaaaaatactacgttggattgcatgtagaaacccaagaatgatgctctagtttttggctctttcgtggctctgtaaaagttctgagggtaaggaacggtcaaccacattgcgaaggctttccaacattggcgaagggcaaataaatccgaaaggaggacg

SEQ ID NO: 2504 - DNA, 232 bp, Clostridium magnum
gtcaactacccccctcttatagaagaggaggcttgtaggaataatcctacgaagtcttagttgtctagcctaagtgttcactcactacgttggattgcatgtagaaacccaaaaatgatacccaagtttttggctctttcgtggctctgtaaaagttctaagggcaaggaacagtcaaccacattgtgaaggctttccaacattggcgaagggtaaataactctgaaaggag

SEQ ID NO: 2505 - DNA, 324 bp, Macromonas bipunctata
gtcaatcaccccgtcctaaaggacgaggcttgggcattaattgcttgaagcctgagattgatcagaccgagtagtcgaaaagctactacgttgccagtaagtacaagactcacctcggagtgcttcctcagctctgagctctgaaagtcgcagcagcagacaagcgtcgggtacgtacgaaccgggctgcgataggcactcaggtgccaagctggctgacaacatggtcgaggggagcgatgccgcaaggtatctgtcacaaggcccgtaagggcaaagctgtatccagccggtagctgtgctgttcacagtgtgtaggagatg

SEQ ID NO: 2506 - DNA, 305 bp, Macromonas bipunctata
gtcaaccacccccagcctaaaggctgaggcttgtaaaagcaagcctggttgaccaggctcagtgccgtaaggcgctacgttgtgcgtaagaccaaagaccgacgtcggtatgcttccttagtaccgacttctcgaagatgccgtagcagacaaggtatgggtgctacgaaacggacggcatctggaaagcgtaagccttccacctggcgtacaacattgccgaagggagcgataccgtaaaaaagtatttgtaacaaggcccgtaagggctggcagctgggaagacagcatttttaggagtcgtc

SEQ ID NO: 2507 - DNA, 324 bp, Nonomuraea polychroma
gtcactcgctccccggcctgtaggtcggggcctgtcccgctgaaccggggcggaccggagtgaccagatccagccaccatgcataaggaggtgaccttggtggctacgttggacacacgtcagcagatccacttcgccgtgcttcctcagcggcggactctggaatccgcgcctgcagacactcctggagcagggacgaaacggggcgcggaggccttcgggcagcggagtgtccgacatggtcgaggggagacccgccacgcctcacctgacgcggcgagcgtcacccccgcaaggggagaagccggtcgtgagaccgcaccc

SEQ ID NO: 2508 - DNA, 284 bp, Paracandidimonas soli
gtcaactaccccgccctgaaggacggggcttgtgaaagcaaaccaggttgaccagggaaagccgtaatcaaccggctccgtttgcaccaggtcgttaagccccaccaccgaatgcttcctcagttcggtgctctggaaggtcaggatcatgctggcgaaaggtaaagcgccgaaggttctgatcgccgcgtaacgcgggagccgggtgcagacattcccgaggggagacagggcgcaagccctgcgtcaccaggcccgtaagggcagataattaaggaggatcg

SEQ ID NO: 2509 - DNA, 344 bp, Actinomadura darangshiensis
gtcaaacgctccccggcctgaaggccggggcttgcctcgctagccgaggtaggccttgtttgaccagcccgagccagcacgcatgggaggtgaactagttggctacgttccgtgcaggtgagcggacccaccaggccgtgcttctccagcggcctgctctggaatccggttcagcagacatgcttgggggcaggcgcgaaacggggaccggacaccgcccttgcggggtggtacccggtgcggaacatgggcgaggagagcccgccgccgcctcacctggcggcggtggcgtcacccccgcgtccccttcgggggccggggagatgccgcgtgagcggcacgcg

SEQ ID NO: 2510 - DNA, 337 bp, Actinomadura darangshiensis
gtaacgagatcttcctttggacgaggaggctttcagttcgctgtgactgaggccgtcgttaccagcaccagccaacactcatagggaggtgaccttgttggctacgttccgcacaggtgagccgacccaccggcccgtgcttctccagcgggctgctctggaatcggggctcgcagacactccccggatcgggaacgaaacggggccccgccacccctcccggaagggcgggggcgccggtgcgggacatgtgcgaggagagaccactggtacctcacctggtgccagtggcgtcacccccaacccatcggttggggagcagcgccgtgaggcgcat

SEQ ID NO: 2511 - DNA, 393 bp, Branchiibius hedensis
gtcgacgaccctgccctctctccgggctcgttgaccagaccaagacatcagtgatttggaggtgaccaagatgtctacgttgcacacgggtgcgcgaacccaccggcgggtgcttcctcagcctgccgctctggaatcggtgccagcagacaaccccggggtagggacgaaacggggcaccgacatcccgcgcacggcgcaagccgggcggcgggacaccggtgtgcaacatggtcgaggggagaccaccgggggcgcacctgtacccggcggcgtagcagcagtacccgcagggcgtaagcccagcagcaccaagcaacacagcgccacccagcagaaccgcaccacccgcatcaccagcagccccaagcagtctcggttcacggctgacaa

SEQ ID NO: 2512 - DNA, 282 bp, Pseudomonas rhodesiae
gtcaactgcctcgtcctgaaaatcggggcttgtgaaaacaagctaggttgaccagggatagccgtaaccaaccggctacgtttgcaccaggtcgaaccgacccaccccggaatgcttcctcagttccgggcactggaaggtcgggaccatgctggcgaaaggtaaagcgccgaaggttccgaccgccgcgacagcgggagccgggtgcagacattcccgaggggagcgagccgcaaggctccgtcaccaggcccgtaagggcacagttcaaaggaggatcgc

SEQ ID NO: 2513 - DNA, 417 bp, Ruminococcus sp. AM40-10AC
gtcaataacccgcgcccgaggtaaacctcggacggggcttgcaaaagaataaattgttttatttccacttttgtttagctccgttacagtttacggaaggtgttggccgaaaggccttattgattagccttagcagtactgctacgttaccgataaaataggcgccgtgggatactcctcaagtctcacgctctgcggtatgctgttaaacatctcttagggtaggagaagtgcagtatacgctaaactatcggataacattggcgatgaggacaaccgattctgactaggcgccggcttgccggagccgaaaggatagagaacctgtatggattattttcaagcatcttcggatgtttggaaatggttgatacagaaggcgtaagccaccccggcttgccgggaaaatacaacaca

SEQ ID NO: 2514 - DNA, 190 bp, Bacteroides dorei
gttaaaggaatattaactacccactaggctaaagacctgtgggtgttgattagtctaagcactttgggtgctacgtttggagagaatatatagttaccaaggggtgtttgttcaagccccttgctctaaggttaaaacctctccataacattgacgatgagcatttaacggagaaatccgacttatagta

SEQ ID NO: 2515 - DNA, 271 bp, Eubacterium sp. TM05-53
gtcaactacccaccaataaattggcaggcttgtaaaagcctaagttgactagcctaagtgctttgagcactacgttaagagagaatacatagttacccgtggatgtaacacctagtctacggctctaagggaacatattaaacagttctgtgaggtaggaacagtgtgtggtggacaatagtcctttatccattaaacctttcattaacattggcgaaggtgtcatttacagttcaatatgtactggcttatcgctctaaacatattaaaa

SEQ ID NO: 2516 - DNA, 252 bp, uncultured Clostridium sp.
gttgaattacctgtatagcatataaatatgccattcgactaccctcggcgcaagctccattatcatcgaatgatatagacacctatgagtataagcaacaacatccaagctcgtagcgctgtgtctgcagattaaacagtgctggcaggaaggtacagtgtctgcagagaaaaccgatgaataatattggggatggatgacttactgacatattatgtcaggcttaccgcactgaggctgtgatcaaacaca

SEQ ID NO: 2517 - DNA, 282 bp, Pseudomonas aeruginosa
gtcaactaccccggcctgaaggtcggagcttgtgaaagcaggctgggttgaccagggaaagcggtattaacccgctccgtttgcaccaggtcgaaccgacccaccccggaatgcttcctcagttccgggcactggaaggtcgggatcatgctggcgaaaggtaaaacgccgaagattccgaccgccgcgacagcgggagccgggtgcagacattcccgaggggagcgagccgcaaggctccgtcaccaggcccgtaagggcatagttcaaaggaggatcgcc

SEQ ID NO: 2518 - DNA, 306 bp, uncultured Clostridium sp.
gtgaactaccacacaccataaaggtgtgtggcttctgttaaatggttcaccagactaagttgttagaaatagcaactacgatatttaggtcatgatacctttggttaacgcaacagaccattgctctatcgtacatatttaagttaggtcagagtaagaacagccttgtgatatgtatacaaaaagcctttatatcattgtcgagttgaggacgaaacaactatgtggtaatggcatagtgtagtacgcattaccattgcatatgtaatggagttgtgtgattaaattcacagaaaggagtgccgg

SEQ ID NO: 2519 - DNA, 295 bp, Ruminococcus sp. OM05-10BH
gtgaactaccacagaccgtaaaggtctgtggcttctgttaaaaggttcaccagactcagggtttggaaacaagccctacgatattcaggtcacgacacctccggttgacgtaacagaccgttgctctgtcgtacccaggttaagttaggtcagagtaagcacagccttgtgatgggtatgcaaaaagcctggatatcattgtcgagttgaagtcggaaacggctgcatggtaacagtgcagcccagtacgcattacctgccatcaggcagagtatctataaggagggacttatct

SEQ ID NO: 2520 - DNA, 285 bp, Bacillus cereus
gtcaactacccaccacttaaacgctagcgcgttttgaagtgggggcttgtaaaagttctggttgtctagccacggtcctttgtggactccgttcgtaggttgcatacccaagaatgattccctagttcttggctctatggtggctctgtaaaagttctggttgggaaggaacggtcaaccacaagtcttcttgcacaagaagttgccaacacctacaaacattggcgaagggaaacaaactcttaggagggacaaatcatgcgtgtatttgtcaagaatttaaga

SEQ ID NO: 2521 - DNA, 285 bp, Escherichia coli
gtcaatcacccctccctgaagggagaggcttgtaaaagagcctgagattgaccagaccgagcgccgaaaggcactccgttgtgcagaagagcgcagacccaccctgaaatgcttcctcagtttcaggctctggaaataaccgtagcagacacacttcgggtgagtacgaaacggacggttatcggtcatgtgaatgaccacctgctgcacaacagggtcgaggggagcatggccgaaaggctatcgtcacaagacccgtaagggtatttatttaaagggcgttat

SEQ ID NO: 2522 - DNA, 328 bp, Ruminococcus sp. AM42-10AC
gtcagcttctcggctatagaataaccgagcatacagaaatgtatggatcagttatctgtagcacctgaaagggcatgctgactagactaagcgcaacggaacttacagcttccatgctgtgaaggataccattagtgctacgtcccggatatcaatacccgacccggtggtacccaagccggcacagggttcaggcaacggatgtcttcccggagaagaagataccgacctggtgcaggaagtatccggaacattgtcgaagggtgaacactctcctgtgggagggcaggatttttgcgtacctgccataataacataaggagggacc

SEQ ID NO: 2523 - DNA, 246 bp, Ralstonia pickettii
gtcaactaccccggcctgaaggccggagcttgaaatgcgactgacaagctcgggttgaccaggcaaagcggcaaccaacccgctacgttgcgaataggttcaggaccgacgttgggatccttccttagtcccaacctctcgaagccccggttgcagacaagcgacagggtaagcacgaaacggatcggggcagatcgccggttcgcaacattgccgaagggagacttcccgcaagggaggcgtaac

SEQ ID NO: 2524 - DNA, 402 bp, Klebsiella pneumoniae
gtcagtaaccccgccctatcggacgaggcttgtaactgaaaactgcattatcgttttcctgaacaagtctgcgacttggattaactgaccagccttagtctgtgaaacgatgagttttacagactacgttaaaaaacagatgacaccataggatgcttctaacttgcagtaccgaaatatgcaaatatttcgtttttattctgcttctccagttctatgcaatgtcgtaatacattaaacatttctttggggtaaggaaaagtgtgtattacatggtagaaacgtaacgttaaaaacgttgcgtaaaaccgaaatgttttttaactttggcgaggagatcttactttatgaaaacaatatttttcataaaagataataaggtaacttatttttaataaaagg

SEQ ID NO: 2525 - DNA, 509 bp, Ruminococcus sp. AM36-17
gtcaataacccgcgcccgaggtaaacctcggacggggcttgcaaaagaataagttttcttatttccacttttgtttagccccgttacagtttacggaaggctgttggctgtaaagccttattaatagcgccggggtcacccgtcgttaccacataaggcttacagccttattgattagccttggtagtaaagaagccggccaaaccaggtcaggtaaatctttaactgctacgttaccggtaaaataggcaccgtgggatgctcctcaagtctcacgctctgcggtatgctgttaaacatctcttagggtaggagaagtgcagtatacgctaaactatcggataacattggcgatgaggacaaccgattctgactaggcgccggcttgccggagccgaaaagatagagaacctgtatggactgcttttaaatatcttcggatgtttggaagcggttggtgcagaaggcgtaagtcatcccggcttgccgggaaaatataagaataaaag

SEQ ID NO: 2526 - DNA, 298 bp, Clostridioides difficile
gtcaactgccattaccctaaagggtagtagcttgtaaaaagctagttgaatagcctaagtttacactacgttatgtaagaatatataggtactttaggatacttctctagtcctaaactctacggtatatcattaaacatcactgatggcaggtgaagtgtggtatatttaaaacctttcataacattggcgaagagagcttaccaccgtaaggtgaggttaaattatctgaaaggattatactatggtatatgtaattaattttgaaggaaaaccattaatgcctactactaatgca

SEQ ID NO: 2527 - DNA, 317 bp, Ruminococcus sp.
aggactaattgttaagcggtttattttatagacaaaagtgtaaataagtggacaaatgtatgattacatttcttgttcacacttgcttagcaacaggtttcaagcctcagtgactgctgttatcgaaagatatgttgcagatacgaactgcgttagagaaaaggttaaagacacaccttcagatgtgctcgtcagtctgaagctctgcgagtgccaatcaagaaactatgctaatgtcctgcatagataacagagaaacacatatgccctctccgacattggcaagacgaaaattactccgaaaggaaggtatccag

SEQ ID NO: 2528 - DNA, 295 bp, Arcobacter butzleri
gtcaacaacctcaccctaaaggatgaggcttggttgtccagctttagtaagcagtgatttttcgagcggtatccaatccgccaacttatgagtttttttactgtttaaactacgatatttaagttatcacaccttggagtgcttctccagctccaagctctgtgcaggctctgtaagttgggttaaagccctgtcaacctgatgtgttagtcgcactaaaaagcttttatatcattagcgaggagagagtcgaaagaccgttaccgcagaaatgcgagaaagagattaagttctc

SEQ ID NO: 2529 - DNA, 375 bp, Mycolicibacterium conceptionense
gtaaatcaccccgccctgacggacagggctttcggaacctagttccagtggcccggcctttcaggtccgatttaccagacccagccatcagacaaggaggtgacaccagatggctacgaccgatacacgacagcagacccaccggcgagtgcttcctcagctcgctgctctggaatccgcatcagcagacaccgttggggtaacgacgaaacgggttgcggaggcttccgccacgggcaaccgtgacggggcaccgggtatcgatcatggtcgaggggagaccgcgcgtacgcgtcaccgctccgcgcggcgtcacgggggaacggcttcggctgaacctctcgtatccggtgggagtgatcccgccacacccac

SEQ ID NO: 2530 - DNA, 231 bp, Ruminococcus sp. AM42-11
gttttgtaaccatgtaaattaagaggtatacaaaacctcaaagtatagttttatacctcttattttaaggcacttctatgaaatagactaagagaaatctacgttataaaaagataatatgttatggtgtcgctctagctgtaattatatcgtttgtacctaaacatacactgtgctgaacatgattggtgtaagtgatacaaacatgtaactttttataacattgtcgaa

SEQ ID NO: 2531 - DNA, 350 bp, Lachnospiraceae bacterium UBA2826
gtcaatgtcactaagttaaggctctgactaacagcttccacagtgttagctatccttaactcaaacattgacacgatttttttctttgaatcaaatatgagaatggaagctcatatttgtgcagaatgacgatactgcaaatgcacttgctgctcttgtacaggtggcaaccctgcttcagtttgcagtgatatttcgagtacacggtatcaggaattcggcaactctgcttccacagaaagtaccgcactggatacacagcaacgctgtccacgacagcgaattatctttttagtaaggtgcaacagttgttatgtatgtaagagtaatcgcaaaagacggcacaccgc

SEQ ID NO: 2532 - DNA, 311 bp, Human gut metagenome
gtcaactactcggctattgaatagccgagcatgaaatcgttgtgaaaacgcctgaaagggttttttacaatgattccatgtgacgttatttgataacgggtagctgagcagagacgcgacatatacatgtatctggatggtgtcttcgggcacctgaaagatgctggcacctgcaggtattcttccagcctgcagcaccgcagagtatatgccaagtctaggaaaacgataccaggacaatgcttagggttacaaccgatgcgaaagaaccgttttttcgtgggaaggtattgtccaactctgataaggag

SEQ ID NO: 2533 - DNA, 198 bp, Human gut metagenome
gggtattgaagaattttagtggaatgaccccattccactaagtttcttcaatatcacaggcggatgtacttttgtacatcaagatgacgagctgcacttgtacggttttcccagcctgcaaccatgcgaaggcgtcatctagccaagggaaacacaacctcctgcttcggcaggagagacttatcgtaaaggaggtgg

SEQ ID NO: 2534 - DNA, 199 bp, Human gut metagenome
gtcaattacacccacctaaagaggtgggtgcctgcaagcttgcttgcaggcaaaaaaggtaattgagcagagacatgatgcagcgctcactacggggtaatgccaagccccgtaccctggttacagctgcacctagtctatggcactcttacattcccttcttagggaatgaattatcttatttttaaggagaaccaaa

SEQ ID NO: 2535 - DNA, 242 bp, Human gut metagenome
gtcaactactcggtaattgaattaccgagcatgtagtgttcgtagttcatacgggtagttgagcagagacatgatagcttgcgttctcgttacgagatgacacttttggatactttctagtccaaaacactgcaaagcagctaccaaagtctaagaaaacagtagtattcggtatacacaggcttaccaccgatgcaggtacaccgttgtatctgcggtactgtataccacaaaagaaagga

SEQ ID NO: 2536 - DNA, 254 bp, human gut metagenome
gtcaataacccacgactaaagtcgcgggcttgctgatgcgagtcccactttaacctgggttattgagcagagacgtgatgcctgcgttctccctctgggggatggcacctgtaggtttttccagcctgcagccatgcagagcaggcaccaagtcttggaaaacagttataccgccatgcacaggcttactaccgatgcgggaagtaccgtatttctcgtgatactgcatgacacttaacgaaaggaggcatcgg

SEQ ID NO: 2537 - DNA, 227 bp, Human gut metagenome
ggtatttgcgaaaataggtggttgaccatctaaagttgcaaatatcacaggctgaaacatttgtaaatttatcctatttggatggataaatggatgcaccgtggaattttcccagttccatgcaatgcagagcaaatgttagttgtcagaaaactatctggcagaaaagccaagggaaacagttacctctccagcgatggagagagtcttacgaaaggagattacgg

SEQ ID NO: 2538 - DNA, 201 bp, Mouse gut metagenome
gtcatgaccccacggctaaaaccgggggcttgagggagtaaccaatctctccaggtctcccggtgccgcgagatcatgagcagaggcatgacacatccgcactttggggttttcccagcttcaaaccctgctgatagatgtgccaagcctagggaatctaacccaccttcgggtggagtatttattgacagaaaggagggc

SEQ ID NO: 2539 - DNA, 201 bp, Human gut metagenome
ggctatttaagatttgatgtgggaaacccacaaaaagtctaatagccacagccacagcgacgtatgtaagcccctcaggtagaggcgacggatgcacctgcgggttttcccagctcgcagcactgccaagcatacgccgaggtaagggagacattaccgcctcctctggaggtgagacactactacgaaaggagatgagcg

SEQ ID NO: 2540 - DNA, 206 bp, Metagenome; identical to SEQ ID NO: 2064

SEQ ID NO: 2541 - DNA, 344 bp, Erysipelotrichaceae bacterium SG0102
caatgtcattaagttaagggaaaactgatgatttcggtcgttaagctctcctaacttataaacattgacaggctttttttcttcacataattcagaatgcatggaataagtttgatgcatgtgaggataacatcaaaggaatcacccggcgcccctgcacaggtgccggctctgcgctacagccgatgatgatattgtcagtgcatgccaggagtgaaactctgcgttttccagacgcaaaacccagctcacgaaggcagtaacaggaaagctcctttctccggaaaagagtgagtactgcattatccttcctgcgggaaggaagaaagcgaggatatgttatt

SEQ ID NO: 2542 - DNA, 364 bp, Human gut metagenome
gtcaacaaccaacgcttaatctctgttaagatttgaagcgggagcttcaaaagcaacagccaaagcatcatcttggtaaggtcgtttttgaagctggttgattagcctaaggcataagagggtcacactcttatgaagaacctacgttacttatgaataatacaggcaccctgtgaatgcgtgtaacaagttccaggctctgcggtacgggtttaaacatcggcattccggtggtatcatgtgatgatttttataaattaccacgggaatgtccgcaaaagcgtaagcttttggcctgaggcaagggcaagtgatccgtatacgggctctctgagtcctaaaaccatttgtaacattggcgctg

SEQ ID NO: 2543 - DNA, 243 bp, Human gut metagenome
caatggcattaagttaaggatttcgggcgagcaaaaccgtccgagacacctgacttttgaaccattgacatgttatttttcttgtaccatttacaagataacattgtcaccgcacctatcggtcttgcacagctgatagttaaactgcttcaagtgacaatgatgtaacgggtgtaggtagaacttatcaggttctacagtaactcccaccgtgggagaattatttccagaaaggagattatt

SEQ ID NO: 2544 - DNA, 242 bp, Human gut metagenome
caatggcattaagttaagaaaaatggggctacttcggtagtccctgacctcaacttttgaaccattgacacgttttttatttcgtaacaattacgaaatgatactaacacccttcgcaccagttgctcttgcacaggtggctgctctgcatcaagtgttagtgacattacaagtgcaggtatatcttatcaggatatacagtaacgctcatcataagcgaattatctcagaaaggagattta

SEQ ID NO: 2545 - DNA, 289 bp, Ruminococcus sp. OM08-7
gtcaagtaactcatgactaaagtcacgagcttgcgaaagcaggttctggttttagctgtagggttactgagcagggatacggtgacgtatgcgtgtatccaatggcatcttcggatgccggagggtgctggtaccggaggatatcatgcttttcagcaggattccagtcttccgttctacagagcatacgccaagtccaggaaaacaaacgtaagtgcagtgcctcaggcttaccaccggtgcaggaggaccgttcctcccgtgaaacagcactgctaaaggagttagt

SEQ ID NO: 2546 - DNA, 301 bp, Ruminococcus sp. AM36-17
caatgtcattaagttaagggattttggcagcttcagctgtcaaagtcctttaatttaaaaaacattgacacgatttttttcaaagggatttcgtaacatttgttgcgaatgaaccgagaagatactaacaccccatgcaccaagcgctcttgtacaggtgcttgctctgcttcaagtgttagtgatatttcgagtacaagtacaacttattaggttatacagcgacatctcttcggagatgatttacaatctggtttccaccagagaaaggaactttatgaagcaaaagaaacaaaaagta

SEQ ID NO: 2547 - DNA, 299 bp, Lactobacillus salivarius
atcaactacctcacgataaatcgtgaggtttggtaatagctatgctgttactaaacctggttgactagtctcagtacttcatgtactacgttattccagaataagttataggtacctgtaaatacttctctcgtttgcagcactacgcattaatattaaaccaagctaattggtaggcttcgtgtattaatgcttgttattaaacaagtaaacctggaaataactttgacaaagagaactcacaaagcgtgattctttccgctttgacttaccgtatactaaatatagaaaggaagtga

SEQ ID NO: 2548 - DNA, 311 bp, Human gut metagenome
gtcaacaacctcgcctaaaccgttccgccggttatagacgggacttgcggggaaattcgtaagtccggttgattagcctaagcccgttgcttctgcagcgggggaaactacgttgtgtaccaataatataggcaccttatccatactccacaagtggtaagctctgcggatgtttgttaaaaatctctgagggtagaagaagtgcgaacatcataccgaaaggtaaaacagtacaacaacattggcgatgtggaccacagggcgcaagccctgacttattgatttattatttgcgaaaggagtgccttgca

SEQ ID NO: 2549 - DNA, 340 bp, Ignatius tetrasporus
gtcaatgacccattttcaataacacaatgagcaagcgaagcggggagttttgctccccaaatccagagctcctttacattgacccggctcagggacttctaagttcctacgttagcagttaatattataggtaccccagaatgcttcaccagttcgagggctctacggtaagtggttaaacaagtggaaggggttaaactagtgctgcttacataaacaactgcataacattgccaaggtgacgtgattcatactaagctctaagctagcatgagtcacaccaccatgcaagtgtgtaaatgcttttcgctcacttgcatgagagtgattgaaggtaact

SEQ ID NO: 2550 - DNA, 365 bp, Unknown
  Delaware Bay aquatic sample metagenome
gttgtagcctccactcattttcggggtgctgtcagggagtgcccgcgctaccctgcttggatgctgggctggaaggcaaaaggcgttcaaaaaaatgggcggtggttgacagttttccggaaatgagtgcggattttttccgcagctacaaccagactaagttctttgggaactacgttattgtcgtcatcatacccacgggtgcgtgccagcctgtggctctatggtcgtgcattaaacagggactttggagggtgcccagtgtgtacggcgtcaaaagcggcgataacattgtcgaggcatactttacgtgacggcaacgcttcttcggaagttgcgcccgatcgctagctttaaggctaatt

SEQ ID NO: 2551 - DNA, 20 bp, Artificial Sequence
  Synthetic
cggttccgcaggacccaggg

SEQ ID NO: 2552 - DNA, 20 bp, Artificial Sequence
  Synthetic
agtggtgcctggaaaataaa

SEQ ID NO: 2553 - DNA, 20 bp, Artificial Sequence
  Synthetic
cccccttccctatgggaata

SEQ ID NO: 2554 - DNA, 20 bp, Artificial Sequence
  Synthetic
accgggaagtgaatggacgt

SEQ ID NO: 2555 - DNA, 20 bp, Artificial Sequence
  Synthetic
ctccaaggacaaatctttat

SEQ ID NO: 2556 - DNA, 20 bp, Artificial Sequence
  Synthetic
ccaagcaagaagtgaagccc

SEQ ID NO: 2557 - DNA, 20 bp, Artificial Sequence
  Synthetic
tcccaaagatgcccacctgc

SEQ ID NO: 2558 - DNA, 20 bp, Artificial Sequence
  Synthetic
atcaaaaagagtgaacgaga

SEQ ID NO: 2559 - DNA, 20 bp, Artificial Sequence
  Synthetic
tggtggtctggataaaagaa

SEQ ID NO: 2560 - DNA, 20 bp, Artificial Sequence
  Synthetic
cgcagagagtcgccgtctcc

SEQ ID NO: 2561 - DNA, 20 bp, Artificial Sequence
  Synthetic
tttaaagaaaaagcagcttt

SEQ ID NO: 2562 - DNA, 20 bp, Artificial Sequence
  Synthetic
tctgtccctccctcagtagt

SEQ ID NO: 2563 - DNA, 20 bp, Artificial Sequence
  Synthetic
cccccttccctatgggaata

SEQ ID NO: 2564 - DNA, 20 bp, Artificial Sequence
  Synthetic
actacagtggtgcctggaaa

SEQ ID NO: 2565 - DNA, 20 bp, Artificial Sequence
  Synthetic
atgcatataccagtttgtgg

SEQ ID NO: 2566 - DNA, 20 bp, Artificial Sequence
  Synthetic
acgaatttctgcaaacagaa

SEQ ID NO: 2567 - DNA, 20 bp, Artificial Sequence
  Synthetic
tttattttagctgaagggaa

SEQ ID NO: 2568 - DNA, 20 bp, Artificial Sequence
  Synthetic
tttatttcccttcagctaaa

SEQ ID NO: 2569 - DNA, 20 bp, Artificial Sequence
  Synthetic
gagagcaaaagatacatctc

SEQ ID NO: 2570 - DNA, 20 bp, Artificial Sequence
  Synthetic
atttgtaccggtttttgtat

SEQ ID NO: 2571 - DNA, 20 bp, Artificial Sequence
  Synthetic
tgtgcccattggtggtctgg

SEQ ID NO: 2572 - DNA, 20 bp, Artificial Sequence
  Synthetic
tattcctgacactgccagga

SEQ ID NO: 2573 - DNA, 20 bp, Artificial Sequence
  Synthetic
gggacagaaaacctagaaaa

SEQ ID NO: 2574 - DNA, 20 bp, Artificial Sequence
  Synthetic
tttaagagcatcgaacaata
